United States Patent Application Publication US 2026/0344675 A1 - sequence listing, part 3

SEQ ID NO: 9 - DNA, 242251 bp, Paenibacillus xylanexedens
  source 1..242251: mol_type = genomic DNA
aactaataataatcaaattataatttttttcatgcatcatcgaaaaagctttagttttttagacttgccccttcctctgtaacaaagaaaggggcagcacttgctgtgagtcataacagtctacttcaaagtacctactcatttcatagaacaaataaactcgcaggaacctgtttgcgcatcgttccgaccggaatgttacctacactgcttctatggtctgtatgctgtaaatacagactcctgcgagttttccttcaaaaaaattgccttacttatgttgagatacagttcgtagcggtgatattcaaactgacgttcctcattagcttaatcatttatcacacgaattcaattaacttactttctacttctacatcaccaatcactgatgtaccatcttaaaaggataattgaagaagattgatcattctcaaataaaatcatcaagttgtacagttcgcccctaaacagagccccatattctatcctttcgggtccttgaaaacatggcttgatttgctcaaacaattctctaaatacaaattgatgagcattctccggcttcattaatgcctcccgcagttcccacttgtttctccacttattatgcatgaagagatacttctcttggaacttcaccacaattagagcatgtgtcagtgactgatgggatatttttgcagatgttgtagtgacccatgtgtttatatcttttaaaaatgcctcaatcactttaaaggtagcaccgttaactaattccaattgaaatcagctgttgtactttctttcctgttcttgcaaaatcgctgactaggacaattactggacgttcttcgtttattaaaacaaatgtatcattcctgctgatacatgttggtaagctgttagaaggctttatgataatgaatatgattacttctagtaggatgttcaaactgttcaaacagcaaacaattcatctatccgttaatgccataaagctgaggccatccgtttgggcaaataccgaaatttgatataaatgagcaagtccaaacttcacccactgttatacaatagactttataacagctgtcctgtcctctgagttccaagtcttttttgaaacgaactcagactctctgcagtacagtttgcctcacttgtagcgaatcctgaagtagttggatatgaaaaacacacagaaaatacaaatgatgtcagagataacaaattccaatatgttttatggtcaccgttttgaacacctttattctaaagaatctagctattataaatcgatcgatcatgaaaacaaatcccaaaaaattattccaatttatccaagagatttgagtcacaacaacctctctttacatgtgcgctgatgtctttaattttctttttttcttcaatttccaaattatcatctctctatcttcctgtataattataatccaactcatggaaatatattaaaaaagttattaatttcattttgggctttttttcttagggcatcaaaaggacctcttcgatccttatctttaatagacttatttttggaatttataaaatttttaaaactaatatcatctggtagattataataatcatccaaataatcattaaagggggtttgagttgaattaattacttctacaaatagttcgaattcttcgatacttaatgagaatatacccataaggttaaattgagtgttaaaacctatcaattcttcgattaaagtttttctcatgctgttagctgtaggaaagttatccatagcgatagtcatgaaataatatttcatgtccgctgttaaagccggagtaatttctttttgaataatatctaacatagcgttctttatttgatttaacggcttcacagtgtttttttggtaagaatcatctatacttttttttctagcataatcccttattacatcttttttcaccctataactcttaacttctatcaccaggacgtaatcattgtaaattaaaaaaacatctggggatcttttagaagaattatcatacaaaaattcttctttcgctctgtaaatattgttataatcagccgttttaacaattagccatgaaacataagattctaacatgaatccaaaatcgtttctgaaacttacccttcttttgtcatcttttgagaagctttcgagtaattttgagtacaaggaatgaaaaagtaagtcttccatcccttttctttcaataggtatataactattagagtctattttaagaaaaggtttgtttgtgaacagatcaaacatgaaattttcgtgagtcttctggtttatagccaattcattcacaaaccattcttttccctcatcaagatcaaaacttatttccaataacaattgtttaaattggtctagcaaaatatctttaaaagggaagctactgagtgatatagaccaggtttcactattaaactctttattattttcataaagttcaagaacagtaaaaactaaagccgctgttaaatatatgtaactttctaattgcatctgatatttagtaatgaaggcatcctttaaattttcaagagaggctgcccctttactaccttctttatagggtgaatatatgaaaagaaaaaatgttctagcatactgatgcgaggcagtgtcatatctattaaaaaacgaattagcattaatatacgattttagatcggtttctctataatccatttccaattcttgtacgtgtgtaattacatttattaattctacaaaagtagtatcttcatgttgattaagtttaattgagtaattatctaggttctgaaatagatgtttccatgttaaaagaacaccatgacgtgtaacaagctgactaccttccaaatattcaattattcccttttcattcttatatgtggttctggattctttaataaacttctcattaattttttcacaatctttactataaatactgttatcaataaaacctagctgagataatatactagctaatgatataaaatcatcataattatatattactttactcatatcacttatagtcattgaattaaataggtcagaatacttcgcgtaagtgaatcgattcataagtaagtcaagtcccctatcttttttcggaaattctagaatattaattattgtgaatttctagagtatctcaactaaaattgcgagccgattcgaaatggctcgctgtcttaaaactaatctttatcttctgacttggagcagtacttaatgtagtagacttgccattttagaacaacgttttactgcaaagcgttaacgtaactttgtacttatctttggttaaaccaatcgtttcactctcaagatcatatgtaaatgatgcacctagttttttgaaatgttacgcaatgaaaccaaataactttgctcatatttagaggtttgttctcttaaaatctgctttcttattgtttacataaacttttaaaaacgattgcgtgtaatgaggcttagtttcttttggttttgtagattttgatgacggcaactcgagctattggatgactttgaacttgaagaaaaactttcgccatgataatgatatttccatattatagttccatatggcatattggtgtaacacgtgtgaccaccatttgatcggttctacctggatgagttaacacacttgttgtccccactaaaaataaaagaaatactaaagcagtaaccaggaactttttttcacgattcatatcctctaactggtacttttttcctaagtatcatatcatacaatatctgataaataaatatacgcttaccatttatgatggaaattgttgaaccaccgccgccaagtttatcaacttctcaaataggaaatatctaagttcataagttcagtgagattaagatcacttgtgagtttacttcgttcctcaatattgtcatttttatgaattgtatctattgttgaaatgtatgttgacgaactccgtgtagaaaaaatgtgcaaccttttgaagtaaccccgttcttaactcaaaaagctaatttgaaaatatatggacacgtgggttcaggggaggtaatgacaggtaaaattcatgctgaactcagtataaccgataagttaacttaatcaataaccaataaaggatcttatatgaatggcaattatccaggcccttcaatgtaagctagaaagttgggaaccactttctatgggcttctcaaaacaaaaaagccgctagatggcagttgaatatagaacattataatgatctggaaatagaatatgcttttattagagaggctggggaatgtttctccatccccgttacagggtcttcttaggttgtttccctgctcacctcacaaggataagtgaatttcggcgtaaagtagcagaccagtattcttagcgtcccttgctctccttgtacccattactttagctatctgtgctttccttaggtgtcttctctaagcctgtgaacatataccgctgcacaagataaacagcgccttttcaaccagagaagaatggctttcacttatatggcgcggtttttgttacaagtcccgtgcgagagtgggagagttaggttactaaattccatctttttcaattgacccttgtagagatttggaactgggattgaaataccctttggatagtttaccaatcctatagttcctttaagtttcatatatgtaagagatgatacctgttatttcaaggtaacatctcttacttccccccccatgaagattcatttcttatagaatccctgtatcggatacgtacattctcctaatctaaggaaaagcaactaaagtaacgtaagctagaaagttaggatccgctatctattggccattaaaacaaagaaagcagctgtatataggataaaactatgcttgaactatcattactgttccatcttccaggcatatattgataatgaccattattcttcgtattcctctctcggctttcaaaaatccattcatatttgcacagattttagccatatctcatgagattcacaacatgatttcgttttgtaaaatgaggccagttgtgcagccacctaagcaaacatttcctaaagtcgtaatgattcttagtattctttgctcttttcttctaagttttttattaacgtagagacaaaaaataccgacctttcaacttcaaaggtcggtttacccctatgggagaagaaaacaatggttataactgcattatatccatccgatgtggttatagaccttattctgcttgaactccatgttcatgtgggcaattcagtaatatcaacgttcatatgttcggtaagcattaaggttacatccactttcactttgctccacaatagttttatcttatgaaggtaacctcttaccgaataatttaccgttaaactcagctcagacctcttttcatctatgatttttatatgatgttcctttaaaatttgtttcgatttgtacatctctaaagcaattttcttttgggtgccgtccaagtattcaacatacacagatttcatcttaaagtttgaagcgtatattttttgcttatctacctccagcgctcctaaaagataaggaagttctaccagcctcttcacgagtgaaagttcctcagaagtctgtcgcacattacacgcctccttcttcaagttttacagcgaccaattgatcaaaatcgacccattcaaatccattctccatttcaattttgattttctttccaaaggtactgactgaagtgacaatcccatgtatataccgattgccccactcatgaaacacttcaatggtgacttgcaatgtatagttaagcgacatatctatatgttctgcaataatctcccactcatcttcatggatcagcggtttcgcttgatagtgaatttggttacgatgctgtataattcgttctttatgttgtggaagcatcatacggctcgattcccataatccattgacctccagttttttgctcatttgtaatgccccccgattttagatgctcgatctatcgcttgaccggcagctgtaatggagctcgctcgtagaatagcaatatcgccaaatcgatccttaatgtcgtccatcacctgatcaatggctcgtttctgctcttgatcatcgaagaacgatagttgatatgtatccgcgttggataattgagataaggatacgcctacacggcgtaccggttgcccatcccagtgttgatggaatatgcgtttggcgatcttgcacacatcaacggttatgtttgtaggatcagacagtttaacttgcctgtgaaaaccagttgggtgatcaaaatctgctcccgatacactcacagatatgacactacccatcagcccttttttacgggctcttctgcacacttctgtacagatatcgaggataactacttcgatctcccatgcttctgtgaaatctctaggcagggtcattccgtttccgatatccttttgtgtactgtgcgtgttgaccgttaccggcgaattgtcgagtccattggcgactcgccagatgacttctccattaacaccccacttacttcttaatttggaaagaggagtagttgccagttctctaatggttcggatgcccatcttccacagatgtttttccattcttgagcctcccccccacatatcgcggatgggcttatctccaatgtggaggtgtaattcctctttctttaagtggaaaatgccaccctcagcttttttagcaatcatatcgcagcacaatttactgatgattttgttttcaccaatgccagctctcgcgtaaacgcctgtttcattatagattttgtcttgaatttgcttggctaaatcgattggatcattaccaaatagatgcatagaccctgtaaaatcagcgaataattcgtcaatactgtacggttcaaccaaatcagtgaactcttcaataatggacatgatttgagtggatacttcgatgtattcttgcatgtgtggttttacaatgatcagttcagggcacttctgaagagactgccagagtggttccgcggtagaaacacctttagctttggctagaggacaagcggcaaggataattccagaacgccttgctggatctccggcgacggcgagaggtctatttttatattgaggcatttttgccttttcgactgaagcataaaacgactgcatatcgatgagcataatggttcgctgcttagccaacactgaaatcactcctgtacatttaagaacgtatgtttgtatatattataaaccgaacatatgttctttatgcaagaggtaaatatttatattctttcgagataaggtcatcgggagaaaactggcctcttgttgcgtttagttgtggattgctcatgttttggtacgagcaccagcaggatcgatcagataaacaatggattttcatctcaaacttgataaattcaccatgcccatttaggcaatgctatcttggcttgttcatcaggaacttcatctgtcgttgaccattagatccaaatagattgcatcaatagttttctatctttcgctaatggaatttaaattctagtacaccatccatgccgaaatatcagctatatgtgaatgataatatgctcaacgatattctctgctatggaatggacgctatcctctgtgtcttcgtccctgctctcggcagtagtactcctgttgacatccttgggctgcccaagttttttggcgcgttacaaaaggaaatagaagtgagctgagatgaaaattttcaatggaatccctcactatctcaagcggcgaaagacaacatggtgtattgctccatggattcatgcgtatacatcaattcggaggatttcagatggatatattgatcattaaagcttgtgcatacctgtatgaaatagatttctcatcctatttcggattcaattctacagaaaacatatatcaacaggatacatcctaaaaggtcaacgaggatctcctgctcgaataacctcagaagaatcctcactgtatacaagattgtcctccacaacctactcaatccatgaacggaatgagtcgcctgggttagaggaaattagggatacgatcatgatttgttaattggctgaagcaggaagagagaaaaacgagcctgatagaatatcggagaattataagttacggagtaatgatgcgtaaagataataacgaaccagcgcctgaatgcactaaaatgaacttgtggaggctgttggagtcgcccccgagaagagtaatcaacgtttcaagaatgggataaccaaactagactggtcggtaacaggtatcgatgagaaagaatctgagagatatcgagaattatgcaagataattgaagactctttcttgaacctcccttctcacaaaacaaaaagaaggcaggaaaagtttccttaccttctaaagttcttcataattctatgaatttaatattatcatcgacttactataataatactacggatttttaatttttctacattcatcaacattttcaactgcagataaagcagagtagcgccttaaaggtttctctgtatatcaaggtaaaatatttgacttcagcctggaagtcaatatttaatctctaggactcggtaataaagaacgtagtggcaattttctttccagtacaagatcaaccctttctggatctataacttcatccatagtctttagcagttcattcattaagtgtccatttatttgttcaataatatattcaaatgagcatagtttctttgcagcgttaaatttggaagaaaaagtgtgatctctaccgtggaaaattggatttctttcattataaagttcatcacagaagtagagaagtaattcttgatccaaaaccttcccaaactctgattgtttgagaagatttccaacagtataattgtccatctccttaccatttaaggttaagagatattgtttatcaccctcaattctgtatacattattaaatttccgattgaagtattctgcatagtcccatagaacaccttcaatttgaggtattattagagaaatagttgcaccatagtagccttgtttataacattcaatcgcctcttttatcaaagaactacgattactgaactccgagatattatgacctttaatttgatttactagccattccaagctattctcatcatcatattgagaagtaaaaacagctgaataatcttgtccacttttatagtgtatatataagattctagcatcggcgagagacatttgatttacaagccacttcaaagggaaggcttcccactcatcttctaattcataatcgtatgtaagcacttctggataaagaatgatataagcatagaaatttataaattcctcagcgtacaatatatcgggatgaagcgaaaatgaattatccatgaaggcaatatttaaatcaattaattctatctttgaagtgagttcaggacgactgttgtagcatgattgaatcatattttcagcgatttgctttttatgatcctcacctaaactcaataggtgttcaatctgttgacttttatctttaaatatttcttgttctaagttattttttaggtcattaaacttctggattaatatttcttttttctgagtgaaaatctgtgatagttcatctggaatttcaccattttccttagctacacggagtaatgaaactacatgttgaaactctatatcttcttgggcttcatctaaaaatggattaggcacacaagaaatggcaataattgctgaggacaatgatttaataacagcggtagacaagtttttaatttttttttcctttgctctattctcaagaaactgacttaataatttttgagaaaaattcatttttcttagcccccgtttattattgctacatattttaatataccaaattattagtcagtctaagtccttctttctatcagcttctttttcttacattttcattgttcgagcttaatacaggttacagtattaagctgatcgattggcacgattctgtttttcatatagaccacttctttcaaatcttttatgataattgtataaaaataggaggtgatagttatgtcaatagaattaaatgatttgcctgatggcgtaagtgctatatcagataaatcaagtgaactacctggcggtgtctttatagtcaaattcgaaaacgaatcgagttggagaatttgtctgtctaagaaacttagccctgagtatggacgcttctcttcctatcgatttgaaacagaggaggaagcggttaaagaatacctagataaaacgtggaagtagttcctccaaccaacatttagaaaaggactcgttatattatttctaacgagtcctttccttctagtattaaacatttgtattgagtaggttttaacatttgggtgaccatcatatttatacttacgctcactcagaagctgttctacgctcttcaatggaccgcccatcgcaaccggatgttctcgtataagcaggtcagaatgacttatattctgtcataggaaggaaaaagaaaaaagcacacggtgggtgctaaacactctatgccaaaatattcgtccaattttgaatgaatgcattagtagattccctgcctttatcaaactactgtgagtcatgtttagcgtagatgtattattatccttataagtgatcacatacttaagctgaatagtataatctgcgtaagcagtcatatacttctctatctcttggtgatctatctttatactaagttggagttttattagttccatctgactctgttgggacatagccaaataacctaaagcaacactgtacttagaatcgccttcatgtctatccaaggcaatatatgcatcacatgtatcggaatatgaaagaaacatgaattgtttaaaaatattcaattgatttaacgtaacatctgctccgttttccatataaccactctcattcaatatcaaaattcgacatccacgaaagttttcccttcctgacacaacaatcaggaggttaaggacagaactgattcactccatcctatctaccccatacgcaacctttgcatttctcaggctgcttgttggctcgtgcacgtttccatttacatcttctggtgctgatcacttcaattccttcaataaaaaaagccgatccagtgaaggaatggctttaatgtgatatgtatgttgttaacgtaattcctcaaaacatagtctaaaatgattcactctcattcctagctaattcaattatgcgctcgtctttacatttcccgttttctttgatgctgacaacttttctttcattgcgagcaacatctccacgagttcatccctagcaatcagcctaaccccgtttgatttagcaagctgatatgcctgttcagtatagttgctatttgtaacaacccatgctccatttgctctgtagtgtgccttagctccttgaacctcttggacagcttttaagccaacattttttttataacgtttagcttgtacaacgattcgttttccatctttggagataaccagatcggcgccgtaatcacctgcagcttttgtcacttctgccctatacccttgtgaacgaaacagatgtccaagatagtgttcaaactgtaccccatccattttatcgatctccgcaatccctgacctcttcagtcgttcagcacgcttttgttgaatgataaccattaaaacaataatcccaacaactccaaaaaatccaacgacaagtgacgcttgccaagattttgttaaagaatatgtccctacaatacctcccagcattgccatgccggctaatccttggaacagttcttcttcctgtttcgccttactttttcttcttgccataacttttcccccaagcatgtaaattgtactaaaacatatttcgacactcgggactaatttcctgcaatgatagaaaaggtgagaagaggaacgcccggtaatatgctgcatatgcaattgtgtgtttcaatcactgcttttttatgctcctaatttatcacggaaaaatagtcatgtggggttcaacatggtcttaggatgaggtcaagtttggttcaaaattttatagcgaatataatattttattaaaattcaaacgagccctaaattctttaaggctcgtttgaattttaagtttattcgaaagttacactctcacttttattattccaatcaattttaaatatgattggatctttggttttctcagaatcggtcaccaatccagaaatcttaaatggtgtttcctgtgtcgcataagccttaccttcttggtcgatattcgtaccagttacaccatataccagatcattaatttgcgtctcatccccaatatatgtgatgccaaatgaccctgttgatctctggaatgcgacatcccaatgctcacttttaacatgcttaatatcaccatttccacatgctcctaatacaatcaaaagaaaagttaaacaaataactaatgataattttcttctcacattacatccctcctatctaataataacctaaaatgtgtattttgattcaatatatgatacctcggttaattaagaatcggaacaacaaatccaaaatttaggaggaacaagatgaaaaacagaaagaagatatttagttcgttattagcaacaatgatgttattttgctccgtatctgctgcagccgcttcaccaaacgaagaagtatttccaaatgattcaaccgttccagaaggcttcaaagtaattaaggaatatgataccactgacgaaagtaataaagttgatatgcaagtagcaggacgtagctttaaccctgaaaatgaaattaatactaataattttagtacatcccaatctatcaactctacagaagaagtagattatgatattctaacaaacgaaacatatatctacagagatttacaaaatatcgaaacaggggaagtattaactcaatttaagaccgatatggtagtagaagctgacccctttcattggacaggcgggaacaaaaatagcgacaatacagtcaaattaacaattacattgtactaccattcacagactaaaaatcgtttcatatacaacggtttggataaagcatactatcggtatgataaaggtaccaattggaacataaataatgctataccctcaggtacgaattcatgccagttaacccaaattggtcctggaatcgacacaaaagcaaagaaacaaatctctaattgttctcaaaatggtggtgctatagattttggaaaaactttcttagcaactgctccttcaagttggatcgatgttcaagatggaggattggcatccgaagtcggcataaaagttcaagcgggttttctaaatcagtcaaataataataaagtcttcaactatggttgggatttaaaaattagaggtcaaagtcctatttgacattcttatattatatgggaagttaaggtccaattggatcttaacttcccatattttttagttagaattttgcattatcttgttcaaagaattaactttaatgagttggccatactctctataccctcatcgatttttatacgcttaattgtactgtcactaaagcttctccgaaagaatagtaacgtttctttacgcaagtaaccttgaagtattcaaatacttgcagggctgccgggtcctaatgagcctttgtacccgttcaagctgcgcgtatagaagtcatatttgttgtacacccagcgctgtttctctataggaatcgtagcgtttgtcgtcttgtttacatccagatctgtttgaccgatggtatgagtaatttacaatcaccctcttatttaagttacttgttatcattttattgatacgccgccgtattattgtaagattatagactgaggtgccctcgcaaatattcaccaaaggtgagaacaaacgcgtcagctatattcgatgacttgagccctcgttttttcatgtccttcttacttacagtagtatcttgcccttactggtcatcgaccattttcttacggtcaattgggaagtaagtacgtcatcatcggataattgtaagactgcagaatcgttgttcatataattgctcatgtttcgttccagttgtccctttatatcagctcacatttcagcgcccaggttttcataatgttcatccaaaggtgttgatccattattgatagaaataactttataacctatggctctaggagttggataccattgtatcgaggcgcgggaaaaataaaggatgcgtagctacgataattaaacgaaaacacgctcgtatactgctattctcatgccggatcgtacagcattgtctatgaaaattgtgctcggtttggtgatttcacaataccatacagttgccttccttacagccactgttgaccgcgggaaggagttcgcttgctatgcctatgtcgcacttggttttgaaaatctgccatagcaaaaaaaacgatcgggtaccgaaaataccttgatagtttaattttttctatgcttcaaacctaactttgcaaccacgtgacattcttcgacatcctgcgggttattgttttcatcagtttaagagcaaatttggaataccaccaacgattccgtactaatcactctcaatgaatatcaattcctactttttcaaaaatggactggacttctctccctttcattctttcacgcggaatgttgaagccactgatggaagaaagataccaattcataaaatgataagtgctcaatcataggaatcgcaaattgtaaaaatgctggtgtaaagaaattgttctttataccttctaaaggagtaaactattaagttgttatggaggtatttcatactagcctcatttgcatttcacaaatgaactatcctatttctatatgaaagtggtcatgatgtttgggttccggtttaattttatccgatgcaatatcgtattttttatgaaataatactttttttacttgagcgttctcagtgcatatctccagaaactttttttcttcctctgccgtcatccccgaattccttatatccattattgtccccgtttgatgactttcatgttctggagtgtcttctccgtctattaaagaacaatcatttatttcaagaattttggatgaagaagttgctttgcggaaagaatcagctaactgactgaccgtattaagtgcttcttttgttaaccacgaatgatccagcaaaaaatctttatctttagccattccatcctttgtatcattaaaattaataaaggcacccccggccggcgagtctaaacgaacgaacccctttggtgaaacacctattttagcggccattcgatttctagagctttgaccataaatcccatccgcattgagatcctctagcttttgaaattgaattaaattctgttcggtgtgttcatcgaagatctctgataacacatcaaggatttcttgaatactggtccagtcctcacttgaatgagctctgtactccttcaggttattttttaatatagctacttccgcatggctatcgtctcttcgtagaattgatttgtagtcggttttccatactttatttaaagctgcagtaccaattgcagctatatttgcatgccccttggacattctctcatcctccttttgcatttatctatccaataaatttccccataattctcataaaaattcatatttgagaattagcataaataaatccatttgtggaacgataccattcgaattaagttaaggagatgataatgatgcctgaacagactcgaaatgaatccggttttcaagatcctcccatcttgtttaccaaagaagatgctgatgatctaccaaacagttcaacacttcctgaacttgtaagcaaatttctgagcagtgttaatttatctagtcaagccgctggagagattcctgaaattgatgtgcaaaatattcgcctgttaggatcacacaacttggcttttgaagaacattccgatctccaaatatcagcagaatcgctttctgttttaactttgggcaaacaggatcatgacattgcgttgaacctttccttgaatacaaagacctcctccgataccctgaacaaaatatgggaaggacttcttgaaggtaatgttcattttggcacggcccagttggagataaagtatgatttggctaaccctcaacgattatcgggcaaatggaaagagaaacaaggtgaacaattgacgtttcaaaatattgcagatgctctcggtataccgcacaacattcctgttgaagctatgggtttagacctgcgttttaaatcagtagcgtttgaactgcaattagatcaaggccattttttattatctgctcggtcgactagcctaggtgatgctttttttgcagcctccaatgcgaatgaaacttggaactttgtatttggcatcctgattccccccggtaaaatgagtaattcacttaacaaaatgactggtaatcttctttctgaaattggaatcggcgaggcctgctgtatctattccacactggaagaggatatttttatgattcctgaattaccgaatttgccggatgatactaaaccgtcttttgggttcttgggatcaaccactatgaaaattgatcgagggattgttttttgtgctgatttgttgctgtctcaaacgaataatcctttgcttaaaatgattcattcaataacaaaagaagatcatttactactccagactccgcttagccccccattaactggacagcgttttactgctcgttttcttgagcccattactattgaggctggtggagcctccattgttttgaagcaaccggagattttattgaatctaaaccccatgcaagttcagttggaaggcctaatcgatgtgccacttggtgctgagtcattgtcttgtactgctacgattgaaattggagaaacccatgctcagtgttccgttacagtaaacaatgtggatgaaaatgggcaaacaaaatcacttccctcccctcttggattatcaggtattcagctggatgaggttgccgtcaacatgggttggatattcactcctccttcacttttgcttggtttagatggaacctttcatgttgtagatcagccttctggcatcaatcagtttggaataactgtagcttttcaggggtcgctgatcacccccaaacttttttatggatacttagagcagctggacctggaactcttctataaagctgtaacaggtaaacaacttaatgcccctgcttttctgaataatctcgcagcaaaacaagtttttatgtactggtcagacattaccaaggagttaccagacggtactctaattaatataggaacgggatttaacgggtttatcgatttattcgggttcaaaacgcatgcatccttgatgctttctgacggaggaattcaaggaagtgccgaggcagctccatttcgtttgggcaacttgcttactataggtggtaatggtgaaggaattagcttgaaagagtatttagtcaacggagactggattaccctcaaaaaagaaccagaagagcagtatgaatctcgattaattacgtatatcccccctggcggtgctgtacttcaatttagtacggcgacttctccttatttatatgctagtgcaaaagtttctttttttgatttgatggatcaggaaatcgagattgaaattagtgatcaaggcttccgtttcgaattggaaaccgatattggcggattaataaataccaaatggagttgccagcttaacgatcaggctttcagcgcagaagccaagtttaagcttgatttggatattaaggtcggtccaataaaaatgcaaggaatagatcttggaagtttcggattagatattgagtttaatacgagtgctacaatcagcggcagccccacggaatggacacttagcttagaaggagaattcatgtttgaaggagcaaatattgccatacctagcttttcgttaaaagcggatacccgagcactcaacgatttacccggctatatagcggacaagatagcagaagctgcaaaagacttgttttcctttccctctgccaatgaagtgcttgaaaaagctaaggaggctgggcaacaagccatcaataaagctggagagaacgcgcaggctcttatggataaagcatctaccgaggctaccaagattattggagatgcggaacaagtcggccaagctatcggtgcaggcgtggatagtgccatagcgaaagcggatgagctccgtcaggaagccgctcaaattatagcaaatggcgttgatgaggttaaaaatattgcgcaagacgccattaataaagcggaagaacttcaaaaacaagttgaagcattcccaggaaaggctcaagaggaaattgagaaactagctagacatgcacaagaggaagccgatcgattaatccgcgacggagaagaagcagtaaaacatgctgaagaacaggcgaaccaatttttagtcgatgctaatgcagagtttaaccgacttaaagacgcggttgtaacaaaggttgatgagatcttaaatgatgctaccgaatatgcacaaagactggaaagcaaagcagccgaggtatgggaagatataaattcttgggcaatagatgtagcggaaaaagcaaaaaaattcagtccaggaagtgaaatcaaaaaaacgtttaaacgaaaaggttggtaaatcacaaaacctaggaggggtttcatggcaacactagataagctgtcttcagcagcaattttaaacaaggtaagcgcagaagcggcgcgtcaaattgaagcggcagcaaaaaaatcagagaacctgattaaagaggcagatacaatctccgaagcagccattttaaaggctaaggaacaggcaataagattattaaacaggagtctcgataatgtatttctggcagataaccgcgggatacggatttgtgatgcactgggaaaagagcttaatcaatttgatactcctacctctgcttatgccatgacggtagatccgctgaacaataagttatattttatcatcgagacaacttcgcaacctattatgaacggagaaacaccttccaataaactagtggaagttacactcattgtgacttcattacatggtaacaatactgaggaaataaaaaaaatgcagtataacgtaccaattgatgtaatgataaccggggcattagatattagtccggatgacggaaaaatcatttggatttcacctaccggaagtattcaatccatgaatactcgaggagatgaacttcaagaacttgcaaaagcgaaatttgatcctctaaccgaggctgttcatgcgactatctccggtgcaggggacttattttggactgcattagaaagagaaacatcctccgagaaagtttatggaatctggaaattagaaaaaggcagtaaagaaattaagaagttaattagttttccccttcccattgctgcaaaggaaaatgttatttcatcgaaagtgcaaattgacttagccgcgggaaaattatattggaacagttataaaaaaattgaatccatgaatctggatggcacaagtccccaggtggtttatgaatctttgtctaacataaccggcttagaattggattcccatttaaaccggttatattggcttgaacaaaatcatcttttgtacaggtctactgtggatgggaaaaatatcgaacaggctatttcatttgaagatagtgaactcgctgtaaaaagtatatacatccgtaccaaagcggatgaggcagcagggatccttcaggcagcccagcgtgaacgccaattggcttctcaaaatgtagccaccgatattagccaggccaacaaagaggcatatgcctacttgtcacctgctcaaaaagcctttcaggcagcagacgctgcatttaaggagcagattgctcctgctgtaatagaagccgaggaaaaaataagtacggctagaacccagtattctgataaaaaggcccaagccgatacaatattaggaaatgcagtaaacgaaaagaatgcaattttgaatcaagccaatgaaaactataaaaatgaagtgaaaaaggcgaaagaagaggcagataatatagtgcagaaagctcaggacaagttagatgatgccaatgcgcacaaaaaccattaacgattaggagtcgacaaataaatttgagtgagaaaaacagttcatcgcatttagatccacgtttgcaaaaatcgcttgcccgttcacaagtatcagggaccgaaaattttgaagtagcggaagtgacagacaaactgatctctgtgatagctaaggttaaagatgttcagacgtttctagatcttccgggtgtacatgacggaaagagaataaccgctgccccagataaaaaaggggatattgtcacagcaaaagtatcgttattagagttggaacagattcagaagtcaccagtaatcgtcaccttgagcagtacacaaccgcttaaattgatgctgcgtgatactcttcaggaaataggtatccctccccttcattcacctgaaacaaacgaaggaaatggagttatcattggtattgttgatcatgggtgtgattttgttcattccaatttcagaaatagcgatggtacaacaagattgctttccttaatgactcaaaaagtaaatttaaacgatgagcacacggaagaagtaatatatacagcgaaacagattaatgctgctcttcaggatcctgatccgtatcgctcactaggatatgatccggggtatggttcgcacggtacgcacgttatggatattgctgcgggaaatggactcgcagacatgagcccaggagtttctccaaaggcggatctcatatttgtagagcctgatcatcctgatatcaaaaacggagagatgggttatttaggagactctttgaaccttctgaatgctgtgaagtatatctttgatatggcgggaaattgcccgtgtgtaataaatatcagccttggaactaatggtggtccccatgacgggacttccttatttgaacaagggattgatggacttgtaatggaaaaatctaatcgtgcggtggttttggccgcgggtaatgcatttgacgataatgttcatgcgtccggtactgttaaagaaggaagttttacagatctgcaatgggcaatccttgaaggcgatacaaccgcaaatgaactggagctttggtattctggaaaagaagagtttcgcgttgaattgttgaatggagataaccaaagcctctttaatataggcttaggagaaaaagcggatctccctggtttctttgcaactcatatcgagggaaataacggtgaccatcaggcgatgatttttgctgcaccaagttcatttggaaactggaccgtacgaattcacggattgaaagtagtggatgggacgtttcatgcttggattgaaagggatgataataatagagcaaaacagcagttgtttaatcagtcccatttccaaacctctgttgataattcctacaccttaaattctatttgctgcgggcaaaaaagtattgctgtaggatcttacagcgccaaaaacaattcgcttgctatttccaacttctcagcagcaggtccaactcgtgatggccgtcataagcccgaaatcagtgcacctggccaatccgtcgcagctgcccattcccgtatgaaatccgaagctaaggtttcttcaggtacaagcatggcggctcccggaattactggagttattgccctaatgttggctgaagcagctaagcgagggattaagctttcaattgatgaaataagaaagctgttattcagcaccataagaacaaatcctcctagttctgaaggatgggatttacaatatggtaatggaagagtggatgcattagcagcgataaatgccgttaaagcattgaaaatagatgagcccctccctattcagtaaaaaattgtgcactataccctcaaatgacaatgaacagcatgcaaagtaaacctctataggatagtaaaaggtctactttgcatgatgggtatagtaaatgtggtaccctcgcttattttgaatctttcggacgtttttgacgagttccatttcaatgacttcaattaactatgttattttggaacaaacaacattactctcgctcgaatcatgttttaacaagcgactactagtatgtaagtggatcacgtacagacacggacactcatcacggaattacatcatctggagacaagtccgtgctcgctcccaaaaagctctccataactattcgttgtggagggcactcaggagttcactgattgtcttgttcataactttcttgctgcctacctgcttcatttcagttaacaacagtctaataccataaaaaaacatacgtattacagttttaattcttttgcagcttcaagtaaccaccatgcaattgcagttttaacaaattcgctttcttggcttaatccttcactgtgaatgaagtcgtttaccttttcacggacttgatactgtacacgctcaaaagctactttatcacttttgataccgagtagttttgctgttttatccaacttatttcgatcagctatagtggtaaacagctgcggaaaaatcataatctctagacggtgtacgtagagaagaggtctaccattttcaaatgagattctgtttagttgatcaatcaacttaacatctgcaattttgcttataagacgatagtcaagcggctcttgcaaccttaataaaagcaagctttgaatcttattctgcacatcatgatctttaaggaatagattattgaattcaaaacgtgtactcttagcattaccctcttttgaaacgtcattagcttccgaggatgtccaatacttttcgaatttcgaaactgactcattattattccaatttaaaatttcttgatgtaactcttctaataattgtaatgcagattgctcaatatgttggttttcagggtaagataattcgtttttcagtttttcataagctttatgtaaaagcatttcattatctatctgcatactatccctccatatcaaagtgatcatagctaactggttggaaaatggatcaagcccacatctttcaaaagtctatatatcccaggatagaactttacaaggtcagtctcttctccgtaagatctcttgcatcagaaatcgttgaggatgtaaacagagtgtccaacatacaccatactcttgcacctctgaaaatgttacccgacttaacttcttcccttggtgaaaatgggactcccagtttgtagacgatataaggttcagtaatctcatcttttgattgttcaccaaatacagtcttcatattggtgacgatctcataaccttctacatgatgtatagactgtaacttcccgtcataacgaaaagcaatgtaattcggaggctcttttggccaacttttccctccatatggatgaaaatatcgcttcttagacgttacaatttctctccaggtgatactccaaccctcaggacttcctgcaccgattgaaactacgtataccaaattggagtcgcgtttttgcatggtcatcaaactccccaagtattgattaagttctctaagtaatcttttctcagcatgggtacccgttttttgagcagtttcagatagttcgtgaatgttcttccatgacagagcatctactgatactttatctattacactaggaagttgtgattcaagatacgttttactgcattcgctcaatacaactatcttttttagcatacataggctatttttgaaggattcccgattcacatacttctgtaactgagttatgtctggtaagttccacccacgcttagcttcaattataagatgaaaatgtccttgtagcttaatctcaatatcggtgtatccctggtttttctcatatccttgcatagtaatttccacttctgtgaggtcaccttgccagttaataatcttctgtagcaatagtctcaaaaaagaggggcattgtgctaatccccaagcaacactgtaagtgatatcgttctcgtgatgcccgagcaattggaaaacactttttatctcccgatttctaagtagaagtttcgtcaaagtagtctcctttctaaataattatagattcatacctgtgatagggaacaacgaaacaattaaacttatctatgtttttactgattgtcctcaatttatcaagattggtgtcagaacattataaacaaaaatgatttactctacatccataagcatcttcataggacatcagtcatccactcatatagttcaagttgataaccactatcctctccaccccaatttcttggatgccaaggctggttgctagaagtaaacctcattgcaaaaatagttttttcatgtttattaacgatcttaagaatcccagcgattgtatcttcgtattgaccttgtagttttgatttattaacaccccaagctattatgacatgtttaatgcgaggatttttgtctagtatttcatcaattgttttcttgtttttatccatgagctttttataatgggatgtcccaatgtgttgattcaacagccgggggtctttagcgtaaaacggaaataagtttgcaacaaaaacccctgagtatttcccgtgacaaaagctcaatacattattgattgtcatgtcagaatttaattcattagccttactaggattcctcattataataaggacttggctattgctatcttgtattctaaaaggcacatacatggagaatctctgttcgttatcaccgtcaattaatatattatcctgatcaatatagtctttgtaagtgtatgccatatactcactctttcatttctctccatgggtcgttctaggaggattttaatccacgtccatttgtgggatgcttctataactaaataatagtccataaaaaatgaaaattgatgttttctcgcccaaatctcaggcgtgtttgtttacttttgggatataaaccaattcacctagaatgatacatagcaattctccaagaaaaataaattcagattttgaatattttacatatctcactccacatttaacaggtaataagatgcaaagccactgagcagaatactaagattcgtccagcttgttgttcagtgtttaaccatctcttatatggctgagtcaattgtacgcatggatgttgcagcagaaacattaaactatccatggttagttaaaaagcagccgatcatgttgagatctgctgccttgatgcttcaaatgaaccctcaattccgtttagctcatatgacaagtaaacatgatttaattcattcgaaaaatagggggccacaacgggtgttcctccaaatttaataactagccatgtggtcttctatttggtgaagtatctcctttgaatcaaccattgattcaatctttgaaagcaatgtctcaccttgattattttttattgtcaggtcggcccctgactcaaccatgatatccatcgtatcaagaaacacatcgatcggtatattaccacgaacagcaaatttcattagaggagtatccccttcttggtttctttcatttggatctgcgcctttacccaaaaagtatttaattgctttaatattggctagatcagaggcaagaaagaatggagtctcgccatatttatcttttaaagtaaagtcagctcccgcttctactaaaaattctatcatttctatatccaagttatatatagcagcatggagaactgtagaccccttataaaggttatttattgatccatcttttgacttggtgagctctcttacctttgctaaatcattgtcatagacggcttgaaataatgctggaaccttgtccgtgtcaccggtatcatttgaacaacccacaagcaataaaagtaagaagataaaacaacctaattttttatacactaaatagtcccccactatgtttaatttctattctgtagatcatctatggagaattaatactctctcaaaatactccatcaactattcgtacaaccaaaacaggctcaatgcacttgcccctgataccagtgcttggttacgtcgtagaagttcagatcgaatcccatcggtctaatagttgttacagaagatgaaataaaagccaaggcagccgcaatatcgaatcggagttctaggaaggttattattcatgattgggataggcgatagttcgagctatttttgcgtttggaaagtgtacttccgaacatcctgctgggtataaagattcaaggtatccagctcatccactatttattccgtacgtaatatcgtgctttgctagtcgttctgcttacagaggaggtcttttgctttatacgtcataaaagaaaatttatgcggcctgcgacacaaagggcagacgaaatataccccgtttttcagccacacccattagctccgagaaacaagactgctatgttagccaacagctttttaaaaccagagagaatagatctccacatgtttcattgggaaattgctctctccaacatttctattaattcatctctcttttcttcatgcgtcatctgatctactggtttgtattcaccttcatagttataatcttctgcattatattttttgtttttctgggaagtaaatttactctcattattttcatccgattcttttttagaagtatcttcttttcttaattcggaaatttcattccatgtatactcttttccattgacttctgtcaggttacccagggtaccatggtattcaaactcatttgtcgaagtagccagaacaatagatggattatgcaccctatccagagcagacatagtattttctattttttttgaatccactagaaattgtactcttttagatttgaattccctatcaatctcagtgatatagtcatatttttcaacaacggaaaaagagttgaagttatccttcaccttcaactttaaatttgtacagtcactccttgactcgtcacattcaaaatttaaaagtaagtcaaatttgtttttggcttcagtttcaaaccagctctctatagatttcgcaaattttttatcattgtttctttccttcaaagctttgtatcctatgtatccgaaacaagcaccaacaataatcagacaagataaaaccataactatgatctctcgatcaaaaattagacgtcgctctttcatttccttatacctacccaatgtttattttttcagcaaacatgtcttataaagtagtacacagtttttgttttcgtgccacaagtccaccttttcttagagtttaatttgattattactcagtcttttttctaaaactaagcttaaagttatttctaatggttctatttacctacaaatcataacatagaatatatgatttagaaatatatcccttctaaagtccttatgtttgaataccataagtcaagttaacttatatagtcagagacatttcatctatagtgattgaacacttttaaaagatttaaatctattaggaatagctaatattactgaagattaagtcacagaagaaagcatatttcaaaaaaattgaggatgaagtttctcttattccacaggaatactcaaagaacaaattgtccaaacccgtattggccaagtcaagtttaaacaacatctcatgagtgtagaatgagaatgtaaattatgtggccttgagaatctgagttgcctacaaccaagacatggaaaaacctggagatattccgataatcatgagagctagataaatataatgtttcctcttttgcccagcacacgattctttatatgataagggctataacattgcttgatgaggttactcaaatgttaatgaacgttgctaaaagagtgaaggttacacttttcgatggagtatgtgaaatatcatagggagaatatcgaattaaatgaggtggtcgaatgaaacttttcacggctccaataaatgaaaaagaacatattatattgatcacaccgagagatccacaagataagcatgcaggcaagtaggtgtttcctggggtaaaaagttgagcctggtgaaaagatagaggcatgagtgtaacgtgaaatccaagaagaactcggaatagaaatttcagttgatgaattgtttggtaaatccatatcatcctatgagctagggacaatcaagttgttgcttttgagtgacttggttatctggagaaaacttagattggttgaccatcatctagtgaaatgcgttagtctgattgtctgcctgtagttccttttttgttcgttaagctacagtttctccgttagcttaatgaatatattcctaattagcgtatggtcctcttactttatttgacggtaaattaagctgaagaaaaaaccagaagaacagctctttaacatccttccagttatcaagacagttttattagttttggcattattgatataaaaccatttattactagggaaaagaacctttatttatgtttcaccttacaaaaggacaggtattccaaaaaacctgaagcgtatttaaattgacttcaggttttttagttcactaggtactacttagaatctagtctgtattttacagtaatccatagaaatattttaatgattaatctttctaaataagtcagaactatagtctctaatatcagaaacattaatcattctatatttattttttatttctttaaaataactatcaattaaattcttatcaataatataatcgcaaacctcatcatcttttaagtctcttctcgtctccaaccaaggtttttcaatatgagtcattttctctaagatcttaccactgtaacatccaaaattatttataatactatccaataactctttttccggttcagttacattattatataaaaaactctgctttgtcttatcctcaatagggttaaacccataatttttatatttttcataaatatctctatagacagggccatgaacccaagcctcacaatcatttttaaataaatattctttgttaaataccttattgaaggcctgggaataatataaaagcttctgcagggctaatggggttatatctgcacactcttctaacaaatattttataaccttttctattttcgtttctttatttttatgattgtccaggtgatcatgtgtttcaattgcttctaaagcctctctgcacttcttataagttaggggggttatattctctatgttttgttccaaaagttctttaaaatattcatgatccactagtaacctctttagaatttcagagtattgttttgttgggatatctccatttagatatctagaaacggtattttctccccaatctaataataaggataacggtctttttttaattttatatttatccaatactttttgaatatcttcaacagaaattaacttttcactttctctaaatgccttatctaattcaattaaattgtaatcacgtatatcagaaacaaaaatttcatttctacattctaaacaaaatgcctctttaccaagatacttaatttctttacctcgtatatttttattcttattaacaagtttttcatcataattcacagtatcatggcagtgttcgcaaaatgccatcattattttttcctccatttctattcctacgtatcactaaaagggggatagtaatgtgtagggtatatgagtaggaattctattcaatgaattcctacccatcttgttccatcctactccaaggtctttgttaatttttgaataaataagagataggtttatttctcttatgaaaagaaatcactatcagaaagtcctttttctttctggtttgagtaatgttagattttatgtagacttcaacattttccaattcgccccagttgtctaaatgacagactttacaaaaaacatacagtttttcgtgagcaaattctttcttctgattatcaactgcataacaaaagtcgtcgtattctagacttagaagaatctccctctctttcttactgtctattttgtacgtttcaataaattcaatattctcttctcgattttcattttgcgcaattgtataattgcggccccgtactaaacctttaaactcagacaaatactgcttaatttcttccggagtaaagtccacatgcttttgtgtttcattaccgaatttccccaagaaaaacgccccttcgccgttattatatgctaattatacaccatatattcttgataatcaaaaaaagtgaactaattagttcacttttttgaacgatttgtgatatgaatgtactattcagctttaacttttctaacgtaaaggataaaacttctttttgtatggcctaactcgttgttaagaagtgtaaactaacgatggtaagaaggctagcctggtaactttatcaaactgcccttctctattcattagctcaacatatccattccattgtaatcatcatctgtaaatgtattgtaatcactgaaaacacaatattctaatttgaatccagctttaattcgtacgtttttagtgttcaagagccaccatacgcagagtaaatctcctcactttgagccagattgggataacaatttcaaatattgcccatggatatataaaacagcttcaacatcgacgccagcgatcgatagacaaccgcttgttaacaatccgatatatccgacgaaccggtcatggacaatatccgtggaaccaacttagactggtagatcacataacaaataaagttccgggtataaatacttcattcccaaacgggagcatgagaggtgtaagtctctcaattcgattttacctattcttgtgagtcaggttggttgtcatccatgaagtcgaaatatctcggcgctccaattgagattgttgtaaaatagaaataccgcttttcgagttcttgattttcttcactcatctccagaaaatccgggtctttcaaaatttcatcattcataatgccttctcgccagaaacacagctcgagttcttgaaatgcaaaagaataacccgttcttggatcgttgtctccgatcattggatactttttcataagagcatggattaaatcctcaaccttagtcgtgaacacatcggtgccttgaaacaggcagggaatgcggagttgactgtaatagtttgggttcattagttgaatgaatttcactttgccactggaatcgtattcgaaatgctcgcgcataaatagcatctcgatatagctaagattaacgggtatgccatcatctgctctccaatggtccagattctgaaaggcctgctctacctctaccctgctcattcctagctggaaaggaccgataccgatatgtggcgttatcacaattgcttccacccttaaaaactcctctcaaaaaaatattttttcggtatataggatccagccaacattgatttctttttactatgacttgagcaattaacattatgaagagattcgcataaactggtgtttaagcgctcaaacattgtaccgccagtatctctatcacttttcctttagaataaacaaatagcagccgatcatgttacagagctacctcattggtattaagttgttgaccatcaactatatctgacatacctagagagaaatcattttaatcatcttcccaatttcttaattctccgttgtaatatgtaagcattttacaatgatgctctttaaacgttatcccccactctcagaaaatctttcaatcaaaatgtttcgtttactaaagcatctgttagattaaagagtgactcaaaatatagattaatctctctaattctggttgtcaggtgacggatagtgaaaatttcagcctttttctcgggcaattatgtcgtaagtaagcttggacagcggttttttgtattgttcctctggcaacaaacgatttccgtacaagaaaagatgaatgtcagcttctgtcaacttcatcaggctgaacaaattcagcagttcatccttgtagctcgatgagtaagcttgtttcttgtaaaggagctctctcacatattctttgtgactttgataaacatcattaatgtgaaacatattcacactattccgtataggtatagactccaaacctgtttttgcaacaattagttccagttcaaaatctgtattttgcccggtcagtgagtcaagagttgtatttccgtttatcttcacatgaaagtaagcatcatcttcaaatccttgctcatatggatacataatttccaagctttttgccaatttaaatcgagagttgcaatgctggcaggaaggtacgaaattatagagcgaaagcgatagcagttgaaaaaccgatttaggataataatgatcaagatcggccatactccgtggcgtgttgtcatctaaagtaaacttagtaatatactgacgattacaatacggacaaacctccgttcccattcgcgtcaaaagactgtgcctataatcagggtctatcattttgtaatcaacaatttcgcttagtaattcattcaggtgatctagttgctgtctcgcttccttaatgagctcatgaaataaatgcatgttctgtgcaaagttgggatgtctattaagtagagtattcaaccacggatttccttgactgtaacactcaacgtatctcatgcgaaaatctatcctactcccatttgtagggctcttaccaattttctccaactcattgttgatctgccacccgctataataaacaagcttgctggtttgtatataatagccgacttgtggatattcgacggttaatacttcaagtggtttcgctaacaaagcttcaattagattgaggttaacagtcccattattgtttagaaagatatctgtaaatgcgaaacctgtaaatgggttgggaggtatcggttgcattaaactatttaagcgattttgtatcacgcttcgcatacgatctttgtattcaacttctagcttagcaaggtgcgcttgatccaatttaatcattacgggtatcatctccatcaagttgtttaagtttatcaatttgattttgcaattctctaattcggcgttctcttacatcaataggcataagacggcgctcagtttcctcaagctgttccattaactttgcctgaatgaaaggttcaccgatcgcagtaacaagcccacgcaattgcatcatttcatccgaatcataattgtggagctgatcaatccgagtcgtaagtttattaaaaaactgtttcgcctgttcaccgatgggagaacttataaaaaaatctgatcgcaaaatatcgtaaatattgctcattagcccaaaatcagcttttttgacgatccgagtatagctaccgtcttcatctctcttcaattcaaggcaagtgataaaaggctttggaacatctgatacaacgaaaggagaatgtgttgtcatcataatttgaaagttaacagaccgcccaatttctatcccattcaaaaaggagaccagatttcggatatatcgacgagaccattcagggtggaatgaggcatcgggctcgtccaacaacaaaataagcgtatctactttgctatttgtagttacagcttctatggcttggtataaattcgcaaagccgcttatgaattccaactctccggcgctcaagttttgataacgaactttaaataaaatgtgctctccatggagccacatacgttctttgtcaatacaattcatgcattcgaatacttctttgttgaaaccatcacgaattgatatgagagctttatcatccgatgtgaaaaggttatccggtagatccgtaagcttagtaataaagcgtttaacagaatgtatattaaaactagaccattctggatcgtattcttctttggttttaatattttcaaaaaaatctaacgagctgtacagataagaaagtctatcttcataactatcatttagttcaggtgtaaatccaaatttggacttaaaatacttccggcaagcgacaagtttctgacgtgagagtagctttttacttgcatttatccagatatccataacgagcatttccaggtagcggatcataaacatctgtttattagtccattggccgtttttgggatgaccattaaaataaatagctcgatttttatcctgatatagttccaaatcgaatgcggctatcttatcttcagtgaacattaagtctctgaatatccaatcagtcaattcaagagaacaaagtggattgagcgctgcaaaatcaggctctaacgtgcttccttcgagactcataaatcggtataagtcggcagataacggaacattcaaatactctcgtttgaatcctacaaagtgatcggctccttcagcgggaaagctactcttaaaccagtctcgcttcttttcgtttgtcatgtataaattgcgaataatatattccagtgatgttcctcttttttctccttcttcctcctggtagcctatatactggcgaaaatgtgcaagttgccgttcaaaatcatattgaacactgaaactgtattcctgactggttcccgcccacaatccatctagattgttgattaaattaggttcatacccctctataacgaaaatatcgtcagtaacatggtagagagcgaaccattccgttataacttcttttcctcttatcggcggattacggaatagattaatttttctagttttagtggaacctagcagatccaaaagagttgtttttccggtgccatttttgccaacaataaggttaatgctgcttatgttactcccccacatctctctaaacggattgtacagtttttcgattttgagatgacgttcatgagggtcaaattgaatggtaaagtcgttcgtaaatgaaaattgctgtcgttcaaagcatcttcctatatcatgtatgtatacatataaaagctgtggtttcattttttcgtattgctccttcttatagttatttaccgttaaaatattcgtatttcagaaaaaagtcctttttcaacatattcgaatttttcttgctcagagtttacataaatgactcaataggacaatgaggatatctcaacctttatgggtacttctttctcagttatatcgactgatatttcattatgtttgactaaagttaggaagctgggtttaaagatatatttataaaagatcggattatattaagaaatgcgacactttactggatatagcaagaatgtaagtgcaacaagcgttaatctgtgttttgcaagtgtgctaaagtaaatctcccataaaggagaatgaagacaaacaagttaaatccgtacactgtatcaagtcagacagctgaagttatacatcagatgtcatttccttcttcatcaatctgtttgcttcctccaccacccttccccccatcccttctactcaataaatgctataaatttatcaagaaattcatcattatcaacatcgccctgattggaaaaactgtaccgttaacttcatttccttttcatactctatcctcctttccataagttgttagaaaaaaaatattgtaaaactttatctttaagaagacgaaatgattctgtgatagttttagatcttccctccgttagtccataggtaactttaccttcgatcttagaatattcagaactactttgtaatgatattcctacttttgaagctaccacagtccaaaaattatcatttaccttaaaatcacttccacttaaattaacgatattatcgagcacgattactttctcacaaagaactgatttttcagttttagatgtgccaacaatagaagttaaatatccaatagttaaaatggattgttcgagcctaaattcataagagaaatcctctttcggttgccttgtaacatatgtataagtcgggaatacgcctggaataacttggtgcgatttcaacatgaatatacaacctcctatcccctgtactatattatgcacctaaaagaagaggtattaaaatgaaaattaagcaatctcaccaaaattaatttagaagtataataaataatatagttatcggtgtgcgacaatgccctacgatgaagacaaattcgatagcgtgcatgattgtaaacacagcgaccttgttttaggcgcattccagaacttacagcaaaaatacaaaaaagccgccataatggcgactaaatttgtccaaatgttttcgtgacacatgaaaaaagttgggggtgtatgccacgaggactaaatgatgctctctctgtgattaatgactatagcggctcatcatcgatttcaaattcagggtcctgttcttgatcgagttccacctcagcttcagatagctgctctggttcttgttccacttcaggttcagatacctgctcctgctctggttcaacctcgggttcagatacttgctctggttcttgttccacctcaggttcagttagcagctctggttcttgttcgacctcaggttcggatagctgctcctgctctggttcaacctcaggttcagatacctgctccggttcttgttcgacctcaggttcagatacttgctctgcttcttgttcgacctcaagttcagatacctgctccggttcttgttcgacctcaggttcggatagctgctcctgctctggttcaacctcaggttcggatagctgctcctgctctggttcaacctcaggttcggatagctgctcctgctctggttcaacctcaggttcagatacctgctccggttcttgttcgacctcaggttcagatacctgctctggttcttgttcgacctcaggttcagatacctgttctgcttcttgttccacctcaagttcagatacctgttctgcttcttgttccacctcaggttcagatacctgctctgcttcttgttcaacctcaggttcggatagctgctcctgctctggttcaacctcaggttcggatagctgctcctgctctggttcaacctcaggttcagatacctgctccggttcttgttcgacctcaggttcagatacctgctctggttcttgttcgacctcaggttcagatacctgttctgcttcttgttccacctcaagttcagatacctgttctgcttcttgttcgacctcaggctcggatacctgctctgcttcttgttccacctcaggttcagatagctgctctgcttcttgttcgacctcaggctcggatagctgctctacttcttgttcgacctcaggctcggatacctgctctgcttcttgttccacctcaggctcggatacctgctctggttcgggttcgacctcaagctcggatacctgctctggttcgggttcgacctcaagttcggatacctgctctggttcgggttcgacctcaagttcggatacctgctctgcttcttgttctacctcaggctcagatagctgctccggatcttgttccacctcaggttcagatagctgctccggatcttgttccacctcaggttcagatagctgctccggatcttgttccacctcaggctcggatagctgctctgcttcttgttctacctcaggttcagatagctgctctgcttcttgttccacctcaagtttagataattgttcctgttgctgaacatcttcttgttccgctccaggttcttcatgttgctgagcatcttcttgctcagcttctagttcctgcagttgtaattcttcctgctgaacttcaggcacctgttgttcggccacattaatctcttcttgcttttgaagttcagctgccatattttctaaatcttcaaatccgctcccaaatagactctctgaaactacagattcatctaaagagtcttcttttaattcagtctccgagatagaattttgtccgacctggtctgtttcaatgttcctagagttttctatttcctgttgttgtgctgctaaatgttctaaatccttgatttcattctcttcatcttttgtcgcatttaaggtttcctgataattttctaatccttgctccttgtcaatttgttcagaatgcaacttattataaagactctcaagattttctctctcttgaattttatctcgcaacttatttaattgaacttgcttttcttcgggagttttattatcccaacttttctggtacttctccaattggctttgttttaattttgtagcgtgtgatgagtattcaagaccagatcttatttgacctaatgtatctttaacactttgtttcaaggttgtacctgttgaagcatcgaaaacctttgtataatggtttaatccggataatcctaattctgttcctacatctaatcctatatggattttacttatcaggtcttctaaactgtatctcggcattttacttggatcagaaagagcttccttcattctttctgttgattttatatgtgcttcaggagatttgccaacaagtaagttcgccttttgattcctatataagttgaccgtgctacttcttactttttgtgtcgcttcgcttgtctttttggatgcacctgctattatgtcctttatattcattgatttttacgcttcgggtaaacggtcaatggccataaatccattactgaccagaaatataatagcttcggataacatgactacaacatcaactttaggcatatccatgacttggacgagattttcaacaagcgattctaatgagaaaagaggatttgccaaacgccaaacagtagctgtgattaatggtagtgatacgggaggagcgccaaggaactctgtcaattcaaactctccatcattttttaattctatgtaccctttagtaatagcaatatgttttgttctaaacgaggttgaaagtatgtccctcgattcaaagacaagtccttgctccttaagagcatcgatgtgaccttgaataacgtgtgattccaggtccagtaatactgtgaatttttcaacgctgtaagatgccatttgtgcaacttgccacactttataacgatgctcttcgagcagcaaccgttgtttctcaaattgcaccccataataaacaaggccatctttatgctgaaactttcctagctcttgaccagcaccaatcataattgagctcatgcttgcacctccagttggtctgcattaacatactctagtccccatagggtgagcttgtataatttaagaccatgtatattaaacagtgagatcgcagtttcaaaattaattccgcgttgatccattagggtatcaatcacttccagcaacataaccttcccagcagctgcattccacacatcgtattgatctttggtgaatacaaaggtcttatttgcattagaatccccaatgagatattcctcattgatcagaccatgtgcatatccgtatcgtgttacttgtaggtttatcaaattcttatcttgcatgtcggaaaaagaccatggcattatgagatttctctcgatgagtctacgaacaatttttgagaaatcaaaattcggaatgtttttaaccttttgtagaatggcagattcccaagctgctagtgtttcaaagcgatggatttgctcccaaacggtgtattcaaattgacttagttcaaactcctgaaaaccatttgctaccacaaacattttggattcatagtccgccggaaactctccgagacctctgcctacacgcacataactcaggtctttattaatcaaaataaaatcactcctactctattaacgttaacatccttaaaatttgggtttggctgggtagaaacggaaaggctctccattaaatggtgatataatacattgtccaatcttcaaatctgtaagatcccagtcttctataacatttccatctacgagatgttcttgtatacctttgtttgcattagatgaggaataagcaatcatccgttggtttttcccgtgacgatttgtgatataggagcggcttggttcatcgaagagtcggaatgcaaataccgtaccaaatccactcagaatactatccgccagtgactctgaatatacatgtttcacctgtccgatgttttgaatacctgcgatgattcgaacacccaaggaacgtccgaaattcagtgcgttatccatatagtttagctttggaataagtggaaattcatcaagaatgaaatatacatttccacgacactgttcctctttagtaccgagtatatttttcatagcaatatctaagatcatcgtatagatcggttttaatacatttgaacttgcaatatcgtactcaaggaagatggctctaccattacgttcttgtatggatttagtgagagaaaagtctcctgcttctctaaaagcaccattaaacacaccaaaaaggttctgatacaaatgcatcaagaaagattggttggtgtttggattattctctttacttatgtaactacgaacccatgataaatcttgatgatttaacagcaaatttcgaatagaaacatcgcttgccttctttacccattgaatcagggtttcatgatcttcggttcccccttctttttccattccccttacttttgcgcttaaaatagcagctaataaatcacgagctcctgtcgcaaagatgggtgctgacgatcgttcaatatcgtctttaaataaagaagaagcgatctcccagatgacttcatctcgtttctctaatggtgtcgcaataatatcttggaagatgttccatcgtaccctaccttctacattatcactttcgttagtgagaacataatctcctgttcgatagaactttttcaaataatcccctttggcatcaaagaagataaacacatcgtcacttgttgccccgctacgtagtgcacgaacaacatgatccatggaaactgtctttccgcttccaatcgaacctacaaagagaagatgacgttgaagaagtaaaggatgaagcataactcctgttcggtctactcctggtattccataattggcctgaggctcatctaaccattttacttcattaggtgctagtgtatgaagttgctgaccattaacaatattatttttcagaagactcaaggttttcctcctcagaaaaaaagagtccattagaaaacattggctcttttttcctcaatctatgtatttgttaactcgtttttgcaccacattctgggcaaaaaacagcgtttattccataagcagtgccacatttgcactggtttgttagtgaatctgaaggatccttatcttccgttttattcatttgttgttgtagattacgagatgctgtaacagtcgtttctttaactttgtttgcagtttgtatcactgtattgagagaagacgacagttgctcacttactggaatggtcagtatgcttccttctgtcatgggtatatctttccatttttcaatcgccatatctcccattacttgtacatcctgaatcagagctcctaattcacgcagcatttgttcagtatgacggcctggtgcagcagcagtgattgtcatgagtgcctggttatttgttacgcgcgagaataacgtgcttgcttcaactgctacgctgagtgcggaagaagattgtgctccaaaaatattgatgtgcatcaacacgcctttagatttcaagccaaagtacaccattatggaaccaataatgagtaaaatccacgagattaatgtagaattattcattgtcataatcaagccaagaagtccaataatagctccaaagataagcattttgaaactacgatgacgaactaggcctgccatgacaccggtaattgtatcgattttagcatctcggatgatgagtccagtacccgcaacagattctgagttaccagtaaagataactctccgattcgttacaattacatacccttctcctttaggaacatataaagcagaggcttcatattcccggatgacaatctcgttctcagccaacgtaataccgcgaaccatattcatttctattcctccattattaggtctactaactagtattcttcttttttgttttcactctaaagtggctctcgtaatatgccgcactcgttacatgtgtagatatatgtaattggtattgaagtgtgatgctccatatagcatatcggacttactgttattaacagtgttatttcaaccgtaaatggtaacttgattctatctttggcctatcgttacattatcaaattaaaacaatccttctgtatcaacataaaacgaaaatgatgttggtatgctatgtgattcaaagaaaaaatatatgtttttagtcccttttgaaacacttgatatttgcatattgcccgtcacttcacttttactatctactggatcatctaagaattttttagaggctagactccagttatcattgattggtgtgaaaaaacttgatgcactagtcgtgtacatctttctacctttaacattatcatctgctctaacttgcgagagatcaacatcaacgctcttattgctattatttttcactgtaatatttaattgtactttaccatcaattttacttagagaatttaaagtgatagttacgccctcacgtgtaacagtaagcggcagcttttcaaacttattgatttgaataacacttccagaagaaacagaaaacccaacctcttgacctaattcctttaatggcatgtatacgcgattattaatcgtaactgcttgaccttcgaataccgcctctgaaccattaactagtattttgctatttttcacaggtacagcttttaaataattatccgctgcataagaaactcctgagaaaaatatcgcaccacacaggaacgcagatattatttttactttttgtttcattatccaatcctccaacctaacattttccattattatatcagcacaataaaaataggtctatatatttataaaataacaaatataactagtcttaaagaaccatataattaattggtttaatataatatttctctattttatgtggaatcgtaacattcatttgtaaatctgcattaggttaatattattaattactttcatttgatagacaactgtaccaaacaaagaacaccgtaggtataagcaaattcacttatgacggattgtaaagctaagcgcgacagcacctctaaaaagattcgagagcggttctccaacccaaggcattttcgtggtctgtggttgattaagcgcaatgtagtctccaaggcttcatccgtcatttatgcgcaatctgtcaccttggggaaaactctcgcaagaggccattggcattctcattcgagccgcgttgccagggaaaatacggatctgggaaatacacctgtagtccatgagcggcttccaggctggcgtaacaggcgaactccttgccacgatatgcagtagcgatttgaaatgcaccgtcagggtaatgcgaggatgctaccaaaagccaacctccatggacaaagctatacggtcaggcgggaatagcggcatataggcgggtcctacgttcgatgaacgtagctaactaaactgcccttgctttttcccacagcacgagacaatcgtatcagactcccaatgccaaaggtttcgcgggatcgaacttctttcgtacgctgagagatggtcagacccaaagcgaacttgacacgtgtctcggcaggcttctgccgtttacctttatgactagcacagtaagttatgcctttcaccaatcagccttgatactgccgacgaatgatcgttttgaagcagactacagactgtccttcttgacgaagacattctacaatttgctcaggaggccatgtagcccggagtttttctttgatgagggtagactgctgtagtgaccattttctggaggggatggaggtcatacgtcgctgaacatagctctcctgagatcgatgcgcacgataggaattctgcgtttcgtttccgatggagttctcgacaaatggtggcatgataataccagtaacatgggcgatggcctggcacttttctcctgttggtggaggattttcagctttctgcgttccattatactaatatgtgtgtagtcctggtggtttcaccttgtatgaatgtggtgtaggaagcttcattctacacgttatttcagaaactaagttcattactaaattccaaataaagtattgaatcttcatagaatataaaaagccgttgattgttgttatcaacggcactccaactattatttagttaccttgtatttaatcagtttatattggtggtcgctaatcacagtgcgatagaccacattttcggacgagtcatatgcaaagttactcttatgcacatcatctaaaacaaagtatttactaagtataatgtctccattatctttcattaaggtatacctctctccccatttgtcatcaatggtcccaaagctagtatactcaatatagctatcgtttcgataggatctcattaaaccattaaaattaagctctccttcatacgtacgagaaaacagctttttgaagttatgatcatataaagtgatactgtgttcagattggttatcaattaatagtctacttccggttgaatgcatagaaatactcatgtttctatcaagcacggtgtcccatttgagtttaccattaactccataagccattaatttctgtccaccatatgaattggatcttgcatattctacaattaatgtaccgtcacttaattgatgataacccgcaacgtagtaaccaccaaactttttgaagttaatcgtaaataacggctttttcaaagaggttacatctttaaaaacctcgattttattctcacctacaaaatggagtacataaccagaagttagtacttcagttttataacctaacacagtctcgcttgtcgttattcctttggaatttagtgtgataaaacgggattgatttttaagactatccgtttgttgtagaacaataccgtttttatacggatagatatttgagaaacttaaatccttcttctcatatatacgttttcctttcgcatccaaactaagaatattaaacgttttcccgtgatttgtagaatactgataaaatatattaccgctctcgttataaaaccatgtatgattcaacggataaaaatttttcactttatttttaatgtcatacgtccaggcaagtttccctgtcttaatatttatcgtatataggctgaaattattaccagacacagtagcggggtttaacataacaagctgagcagcacgattaatatggtcttgtggagtgtgacctagttcaaagctcagataatcaatttctttaggaaaagtatgtacccattcctgctgtagccctccgtgctcctctaagcttaattcggtgaattctgcgtacatctgatttgtactggctaaatacaatgtaaaaactacgaaaattgctatcaaccttttagatatctttcctttcaatactggcacagcccttctcttatttatgtttgcttctatgtacacaacgaaatattaatatgattaacagtaaagttcctgaatcgattttgtttctcttaaagtatctacctatgcaattttaattggatgcaaacgatccttcatttatagatgtcttttgctctaggtttagttgaattttctcccatcttgattaatctatataccgtaaacaaatcactgtgaccaaggatgcaagtgcaacaagcgttaatttgtgttttgcaagcgtgttaaagtaaattttgcgcaaaagagtatgaagacaaacaagcaaataacatccgtacactgtatctagtcagacagctggtgttatacatcaatatcaaatgtcatttccatcttcatcaatctgtttgcttcctccaccaaacccccatccatttgactcaataaatgctataaatttatcaagaaattcatcattatcaacatcgccctgattggcaaaaactgtaccgttaacttctattccttttttcatactctatcctccttcccaacggttatattgtcacaacttttaaagtaatatccactcgttcaaagttaaaatatttaaaggttctatcagttttactccctaaagataattctcagtaggtcgtttcgaatgatcctgatatcgacaaggttgtaagactgtaagcgcatcataagttaaagatgaggttacggaaacctcctttaaatttgaagtaatcgtatgtaaggtgacctgcgatcaataactatgttattttaaatgtcgatcataggcacctgcaaaagtaattcctacaattttaactagatcgtaatgcttgaactcctcctttgaatcaatcaatccattaaccacatttgttgcactttgtataagttcttcctcactgagtttctcattggaaccaatacgaacatttttattaatataatcatctttctcatctttacaagtgtagaggttcaccacgacattatatgcaaatctctgattattactaaactttttcacgtcatctgtcattggataatacttcattttttcctccttggaatacattgtaatgtaggcttattttttaatttttataatatagtttttctaattcaagtcttttcttctagttaatccgtatcatatccgtatacaatagcctcagattattgggcaactcaaaatcatgatggaaatgaccaaagtaccaatgcttataattggctttttgctctattccctgaaagtatggatgcatctcgtccaaatccatgtgaaggtcacaacagtttgcaatgtactttaaggcagttgttgagcatgtgtgagttataatgtagtctactttccagtcaactttatctaagtttcttaatccttcttcgtattccgcttgcgaaggcatttcacggctccaccacgatttaccctcttttcgatactctttatcatgagaagcagctcccccaaacgtaaaaaacgtttgaccttcaatattaaaaacttgtcctcgcatcaagtggatcacgcttttgtttatcctatgtacttcacccccattccagctttcaacagggtactgctctagcaaatcaaaattttcatgatttccatctacaaaaagagtggtgaacggcttggttttgtctagccacttaagccagtaccgatcctcattactatcatcccataacaatccaaagtctccagcaatgatgacatagtcatcttttgtcatgtgtttctgttgtgggaagttccggctatttagtcgcttattgatgctaatggttccatggatgtctcccgtaatatagatcataaactcactccgattaattcaggttattgagtagttccaccatctcattacattataaagttaaaatcccagaacgtcattattttacagattaaaaggaaataattttgtatttactccaagcatcataaataaaatacaaatgcctatactaatacactgtcaacttgtgtacccactatatttcttttgagaccatgacctggcattaattcgccccaagaaaaatgattaattccaactttcctgagggtgaagttgaactagtaactttaattctttaaatgcaaaaaaagccactatactagcggctttatatgttaattatttttttttacttctaaaaactctttcagacagcaggacaagaaatagatctgattattatcatttttcaagtttttcaacttcttgttctgttaatcacgtggcttttgcaatggttgtgatatccaaatccatttcaagcatatttttggccactttctttactccagccatttttgcactttccagcatagaagcctcatcatgcagatatttctgtctagcctcatacaatcgtctagcttccgaagcatgacttaaatattgcaaagtgtccctcacccttcagaaacaaaatccaattaagtcagaacaccttcagatctgagtacatttgggtcttcgattagttaaatcgcgtatcatcaagatcaaaaacattcaccctgtggaatacgctcactttcctgtttacatatgattagttgttttctacctacatgctgtattcagataccaatactgtttacatctaattttttgctccattttttgatttcagaatctcgctgtaaataataactaattcccttcgttctcgcatgagttgagcactttttttgaaatatccatcattttgaatacttatgcttaatcattcttattcacggtttcccaagttcttgtcaaaccttgaactatacgatcaattacgttttggctagagaaatatccattatggctaagcggattccagtaacttttccaattgcctacgttcatctgtatgtcttcactaaccactttttcataggctggatggacgggtttcagcggataaccaaggatgtcatcattgtcaaaaaaattcacccattctcccgtaaaatcaggttgagaacttgcaaatgtaggactaggaacttgaataggtttatcaaaatctttataacgtaaactccataaaggcagtgttgttccacaggaataaaataagcttaaagtgtctccacgttcaagcgctgaatcagcattgattatttttggcttccactgtgctgaattctgtctatcgtaaaaataattacttgcgatcacggtacctaggctgtgagatattacacaaagaggagcatcataacctgcctcctcagataactcatgaagagccgtactgatcgtattatgtactgccatgtaattatgatcattaacttccaggggttggtatgccacagcatcggccaaatagtgaaacataatatgtcttagcttttcaaaatgtaagtcatgaccatggaataacttacactttaattcttcttctctcccctcaaatatctgtgcccaataaacgggttttatgatgagtggctcttgagtgatctccaaagtattatattgtttaaacgaatcttttaaggaatgtataaaaggctctgcaaagttttccttttgcatgcccagtccatggataattaatacagctataggcttagtcattgtacccctccaaatcagaatatttttcgatattaatatccaattaattttctgattttatacactgctttacaaacaatggtttataagtagacggttcagatgggacctcgccaaatgaatgagcattagacacactttttataaagctgtagttgttaaatataggtaagtgatggatgtgtattagaagcatttattaaattatcaagtactgaattaaaaagaaaaaatgattgcatatccatgctttggattgagttctattactacgaattgaagaatgtgtctcagtagggctgatccagtttctacataatgaattaataaaatcacttcaatggatacaatgattactgttgaataaaaatgtgatgagtagtgaaacaatattgtggtagaacttgatttctgcaaagcttggttgtgtagtattcagcctttagatatttttatataagcaatgcaaacagtattttatcttaagaaggagggttacaatggagaaagtaatcgagtgcggtgttatcatcaaaggtgagttccacaggatttcaatccaccagcttcctaccgatattattgagcaagattatccatgggtcgggcatgaaagaagatctactaaagtgtctttcagtgaatatggagatggacaactaatatcctttacaaaagaatggaaaattggtgaaatcaataaaattggagtcttgcccaatgaatgtatagtcagttctataaatggtgaacatcaacctacaatagaacagacttaaagtcttcataatggatactggttaaaaaaatgacacgcctttttgttaaggcgtgtcatttttcaattttgagatgacagttatacttttagagaatcctaaattaaacaacttcatactcgttgtacaaattagttttacctttagcaaagaaatctctattgtttaatatgttttcttcttataaatttctcacaattatgatcgatgcagtgtaatatttcactcaatatcgctacgcttcacagtaactccgtcatcaaagatgatttggtccatctgaaaatcaactgtgatcttctcgagtggtgtatcccgtagctcgctatcctcatccataaattgattcacttcaaaactaccatcataagaagcggatgaaccagctttgattgctttatcgtattttacgttaagtgatttgatctcatttccaaacatgtctttgaaactgatgacgccttgaaatcctttggctgttttgtcagaaatattattcaaatcaagtgtcatgttaatgatgtctctgaaaatccatttatccgagtctgcgtaggtcacacttttcttaattaagccaatttttatggactcattcaaaagtttaagctgaacttgtttttccttttccgcttcttcttgtttacgtttaatctcttcttgtctctttttttcttcttccgctattcttagctgtctctctttttcaccagttatgatttgactaacggttttagcagaaagatctgcactttcactatttgcgttctcaattgctttgctataataatctttttcctcttgtgtaagttgagtgctattcttcacatcttgtgagacggtctctgaataaagttcttccgttattggcttaccacaggcagataaaacaacgaccatcaaactaatcataatagataatgctatatttcttctctttaattcctttaattccttcacttctacacaacccttcaaaaatttcaaaaactgataaagatacttaagccagataaaattatctgcataaatgtatctgaaccattgttgagatagttgacttacttatctttcacaaccaataccgtctccatcacgatcaagtttacgactgtatccaggctccccttcatagatcgggtcagctcctgcggctctaacagcatcacagtttttataatacacattcgttacaattggttcgtttttaacttcgttgttcttttcaacacttggtgcttgcgtgacaacaaccggctcttcaatcgctggcttaggttcaacaaagccgctgtcttggacatagttttctatactccagatcccctttgcttttacacgtgcttgtttctggatttcttcaaattgatctacatatttcgtattcggtggatatatgtaagcaacacgagctaacccatattcgagtagttgctcatttaacattttattgtctatccatacatatgctaacaatctcccgtatttatcgcgttccgaaacatctaattcaagttccatattccctttggcaacctgcttctttacaaagttggatgcgtctttagcaaaaggctgctcttccttctctggatgaacggattccggtgtatcaataagtagtaaacgaactttttcttctttgccttctaccgtaacttttaacgtgtcgccgtccgttacttcaactaaagtagcaggaaacctattatgattattttgggttccttgagtttgttttcctttggaatctgagctctgggatgtctctataacatctgctgtattgctttttgtctcagaattagatgagctgtcctctttagtatcaaccacagcgatcggctctgttttgtttgctgtatcagaagaaagtgatcctacaaacaaaattagaaatactcctgcaaacgctcctaagacataagtcagtgtttgcttacttcccttggtttgactctttttaaattgcttatatgcccagtatcctagagcaccagcgacaagaagatagaaaaacttagtgattacagcaattatgaatgctataacaataatgtataaaattattcttcccatttcatcctccttagtaaatttgtaccgaaatggattataacataattaggtaattgggaatatgtttatctaggtctgaagatataaaaaatcgcagtggtgtacatgaaatcaacatttttttggctctgcttatgcaatagaaactacaaaatctcctcacatcaaaacatcctaaaagaaaaaaccatggaaccgtcttatactaatttctatatgcaacatgaaaagtctctcaatatttagtattttgttttatttcgacaacctaaaatttatcctttaaaccatttcaatctttacctatgatgaaaattgatatttcaaatattttaaatatcaaactacaactaaacccaatataatctttttgtaattgagttattccataattcctattgaaaacaatgtatttgattctcgataagcgatattatatgtataagaagttaaggaagtgtggtgtgttaaatttgaattgtgaagtgaaaattttatccatagagatgcaaaacataaaaaatgttcgttacggtaaagtagatttagatcttaacaacgataatattttggaagcacaagtagtaggtttttatggtcaaaatggttcagggaaaactgctgtagttgaggcattgtcaattttaaagagcttacttaatggtcagaaacttccaggtaagaatcaacggttaatttatgagggtgaaaaaaaactctctctggaatttgaatttatgctacaacaagatacaaactggttcaaagctaaatacaaagttagtttggagtatagagaagataaaatggttgttcagatggaaagtgtgagcactaaggaaaaatcgtaccgtaaaatgttccattacgaaaatgatgaaagaaaaccaattgaattaagccgtaaaccaaaacaagaagacgagattcttctaaagggtatgaagttactatctgatcaagtagaaggttcattatttttttgtaaaatagttacaagccacgccgatagactttttgatggaccggagttagtaatttatcgagccttaagggatcagctttctaaaaatctattaataataaagaacttgcaagaaggcatgttcccatcttatttatttcatgatttaagttcaaaatcaatggaaaacagcacctatgatattaatcaccccgtgtccttatctaaagaacattacaagaatctcgcaaatgtcattgaaagaaacaatgttgtcctgagcgcaattattccaggattgaaagtacagcttaaaaatatgggaaccacaaccctaattaatggagaagaaggagtccgagcagaatttatttcaattaaagaggataaaattttaccattaaaggtggaatcggctggaaatctaaagttatttgctgtaactacttctcttatatctgcttttcacaatccttcaacaattgttgtcatagataattttgatgaaggagttttcgaatacctgcttggtgaacttatcgaaatattccaaaatcatagtaaaggtcaacttatatttacttctcataacttgagagttctagaaaagctctccccacagaatgtttggtttactacagttaatgagaacaaaagatatattaaattaagtggtattcagaaaaacaatgatatgcggaacgtgtacttgcgcgctattttagtaggtggtcaatctgaattcttatatgaagaaaccaatccaataaatattgtgcgttcttttatagaggcagggttgcaggatgacgattgaaggctttgtttgttatagcacaaagccaatttgacagacttttttcctttgaagagtcacaaagattatgtagaaatgaacacgtccgtattgaagcatatcatggtgtaatttttactcatatcaccacatagtgagtgaaaacataaaataaccatcaccttgttctaggaaggaagtggtttttttttataattttcttgtaaggatgagctgcagaaaaaaaatctcttttactttctttctattttaaatggaaatcaattaaaatagaaaatttaatcattttctttattcgttgtttaatgaagttttaactatacgcgcgttttaatgtacagtcttcgacacaatacgacacaaatgatcttgagtaaaaggtattattctcttgtggttaagaacggtattacctttaattttaatggtgatcgtgtggttacgagacatttttaaatctctagtcaaatgtagaatatcgttcaacaaaacaacttgatccttagatatctaaacaatttttcaaacatctttcttacaaaatcagatttgattcttaagaagtacagatgctattcgttgaagctaatcatgagtagagttatgcagtgatctaaagctagtcaggtaattcagcataggagggttagaaagtggaacaacaaagatataaggtaataattgcagaagacgacatacatcaagtgtctttgttgagaaagtacttagaagaaatggatttaatcgtcgtctcctgtgtatcatccgggatacgtttaatagaggaaaccaaattacataaacctgatatcatcttgttagatataggactaaaaaaaatggacggtataactgcctttaaagaagtactgcaatcgggtgtgcatccgcaaatcattttcgttacaggctctatcagtcctaaacatctattagcaggatttgagtttgaatccgttgattatataacaaagcccgtgaacgaaaatcgatttaagagagcgattaacaaagctaaagaactgatatatgcaaaaaagctaattgatgctgaagtagcagaagctataaactgggttgtattaaagcagaattaccgtgatgtaactgtcgcagagaatcagatcatctttgttgagaaggataaacagtatcgtaatagatacattgttcacctcaaagatggaacaactgttgagacgagtacacaccttaaagagattaaggaaatgtgttcgccaaacttagtatattcgcacagaagctatctcattaacatactgtatatcacggctatacaacctgatggtatgtttacaaaaaattataacgtttcattagactatacttctgaaaaagtccctttaactaaaaaaaactatatggatgctagtgatctattcttgaaatttcgtacacaaagtacttagcgtcgccggtggtttacttgtgttttgaactcgatttctccatctacttcaccattttcaaggagctcgtatgtaattgtgatgcttccataatcaattgctggatgtccagtgatctgatcctctaaaagtaataacagtgttagcagtttgctacggttcatcccctcgcctgctaaaccctgcttgggacccctgagtccaatttttgtagtgtgatagttaattgctagttctccatctctcacaaagaattccatcgtgccactggggagcttggaaagtgttcttgggaaatagtcggaaataatgcagagcttaatttgatcatagagattttcgttattttttcgcactagtgggttttctctttctaaatatgaatcgttggacatatacatcttgcatgcacctctcattgacgtaatcctaaagaactattagggacatgactaatataccaatccatgtaggactattaaagtatatttgttcgaaatgttcaaagttatgtctcaaatgttctctttaggttaataaggaataaattgaataccgcccctataggtggttcttatggagtactcgttgtacattattcatctacaatcaaacaagtttggatcgtcattattgtttggttatttgactaccacaacaacaaatccaaggtgtgaacgtatagagtaccccataaaaagaacaaaaaacaccaaaggtacgtcaatcgagaattctcgatcggctaaacctctggtgcttccagaaccgtgtattcaattaaccatagtatacttgaatcgtactagaatgaatagagttattttttcaacgaataggtaggtccttttcctcatacaaagaaagcctccactatctcgagagttgtcagcttaattcagggtgcttttggggaaatcttttattttgattacgaactatattctggtataatatagataataaaatattaaacgtggaagcaccacggtaatccaaagggattgctgtgggctttttttgttttgggagggaaattcagatggctgtgaggatcaaaatggctactctttttagcattttggcaacgacacttctaatatcagtgaaccttttcagcgggtatattgtaggtaatgatcggtttacagttgagattttatcttatgagatcctaaagtatactgcatgctttattttaatctccagcgtaaattatatggttgcaggacctattatgaagccgctattacaggtcattaaaaaatttgatacagctgcagtcagaaattctgtagatagagctcatcctaaaggggatgaatttagtattttggaaaatggatttaaccaattgacagcaacattaaaacttcaaaatcatcaaattaatgcgatgaatcatgaactgatccgaaaaaatgagaatatgagcacactctttaaagatacaattagcgctctttctaaactggtttatgctcgagatccttatacagcttctcattcaacaaatgtcagccgatacgcaaaggcactttctgaaaaattacggcttaatgaaagtgaaagttattatttagagattggtgcgcttcttcatgatatcggaaaagtaggagtgcctgagaacatcctctctaaaacagaaaagcttacggaatctgaatttgctgttattcgtaagcatcccgaatatggatttcatattattaatgagattgaagagctccgaactataggtgttagtgagatcgttctctatcatcatgaacgaatggacggaaggggctatccgagaggattatccggatatgagattcctctgccggcacgaattgtttccatatgcgatgctttcgatgcaatgacaaccagccggtcctataggcctgccttagatgtaaactatgctatagagcaacttcgaaataatgctggtcatcaatttgatccctatattgttgagattttcattgaatgtcttgaagaagatccaagccttttcagagttatggaacaacacgaaaaaatgctcgcaagtgtataacttgtgagcttttataaaatcttagacctcagacggatatgtatgagagattaccacactcttatgttatcacgagaaaggacgtagaattggagaatgatatttacgagttgaaacggcttattgagtatatttcattcaagatattacctctgctcatcgtcatctcaggtatatcagtattaatcagctcaccatctcgtttaacaacttttctatctataaatttccgtatcattgttaatgccgaccgattagagtctagctttggatgggaacttaaaattttctgtcaaaagaatcaacataaactaatgttgttattcatagaaacaatttaagaaaactaaaggtgtctttaccgcattaaccgaccacatctaaattacgttacaagctccgaaacaaccgttggtacgataaagtccagataaaataggaactgcatagcgatctaaacttcttcactgactatgcctcttgatgatttcttgtatagaattggtcttcttccccgtaattctctagccttctttttgaaatcgaatcaactgtaaatgtctttccttgaagcagatcatccttgtacttttcatttttaacaatgccattcagcgaaagatggttagtcaatttttcatgggtagctaaactttcccaggttctccgcgatctgccaccattgcgaatacttaacctgtagccagcacctgattgacgattttacgtttggtagtaaagttttcccctaaaccatatacattcaaaaaaataatataataccatttcgcactgcttccgattggtaatgagcatgttcttgctaattacattttgcccataataaatacctttgggatagatggcctcctgactccgaaagggaataaaaactgccatacttttggtactcaatgttctcagcgcatgaaccttctaccccgaaaggaaatgcggtattcagtccatccatttgctaaagctcaacgtggagaattggcacatttttttcttatcctgctttagaatgagacttaacgttttgatcatagcgcttcactccttctttttcatacttaatcgatccctgtagcgcctcatagtaggtatttgtaaaaaaaattaagtgccgcggcattagaaatttgaattttacatacgcccttaatagctgttctgctatcatgtcgtgatacccaataaagccccatgttgcgaatggcgcagctcccagcacacacatccaacttaacgtttcaataccaagttgcctaaaaaacaaagcaatcgctacaccaacctccagaataaaaaaagaactgccgcaaggacagtccaaaaaataagctttccgtatattcccggattacctggttaattaatctttacttccaccttcatttctcccaagttagttacacattacttacttttcttcctttcctcagtatggctatatccttccccttcatcaaattctattgaatgacatagcagcgtggtagcaagttgaataccatccttcaacccctgcagatacaatcgttcatttataagtccatacttgtggtgatgccagtcctcccattcagagaactccgacatccgtccaatatcctttcctgcaaacaaagcttctaaggctttatctgcttgctcacggataaagtttaattcaggatcgtgctcaattctagcagatacctcatccattcttccttgaatcgcttgccgaaaccacgctggaaatctcatcgttccacttcaccctacccttcttttatagcatctgctcagttcgcatcgccttcatatgctggtagagggccaaatatttcatctagcttgcgactttgctcctgaacttctagacttccagacgaaagaatagactgttctattgcatgttgtcctaatacgtttagcttacgtcgctactcctcaatttttccaaccattcattcgtatcctccacctccattccagttatgaaatgtagaaaatatgaacaagatgagtattaaaaactaccttaatggtagtttaaaaactcgtttaagtcaattatgtactcctacataataagagttataaagatactttaattgaaacgaggacactgtaatgattgtttacgacaaaaagaaggtaggtaagcgcattcgcaagcagcgggatgctctggaaatttcccgtgaacagatggctgagtatattaaacgagtaccacgcttctgtggagatattgaacgaggaaaagttggcatgtccatcgaaacgatgctcagcatatgccatttgctcaaaatttctcctaatgaattactattggataatgaaaccacttcaataagtgatgagtctgagttaattatggcggcactccaaaactgcacagaaaagcaacgtaaagatgcgctggcacttttgaagctttttcttaatgcaataaaatgatcttaattatatcatctagagccccacttcggattgatttgacggtgcacactggcaagtttggaaaatctaagccatccccttttctggaaaataattaaccaatactggaataatgacactatctgctgctaaggcattgattgtcagcatcccaaggattggcatacaatgaataaggacataatcgtgatctgaaccttacctggtcgatatatgagcgcagaattgtttcacggctcatcgtgttctcatgcgacacctcaaccgcgataacttaatattgccttgcatgaaggcgatgccttcctgatgctgtataacaccctcctgtgaatatcatcgttttgacaagcagagtggataacgaacaggatgatatctggttcccttgacgaaaaaaataccctctcaataaagagagggcaaaccccacattgaattctcactcattttttccgttccaaactaatagtaaatagcactccacatgtgttgagtgtacagtgacaaaaaacagcattgtgtccgaaggaatagtgtttgctcttatcagtgcgaatccactaaaattaatactggatttagggtttatccaaaaaatcaaaaaagtgatttagttcttcttcagttaaaggttcaaaaatagtcatagtatcttcttccatatcaaaatcaacgtctcttgttatagagtctttagaatgtgtgtactttactatcggtgtcctgttataaatcattttcggaatacctaacgctaatgccgaaatatcaacttttttgaatgtattaccatctattatttcatcacttacgttagtaaccttaccataaaccaggtatctattatttggttctgataatcttccttttgatgtattagtcacgatatatttccgattaaaaaaccaacgaacaattacccccttcttttttattaacaggtatgaagcatggttgtcgtccttcatttttcttccatgcatcccacctgaatagaagcataagcccccttgtagagagtcatttaacatagccttcttacttagtaaatcatctaagtttatgaactgtaccttagataatatttctttaagcacatcatgaacgtaaaagtctgaaatagcagtaggcatgtggagatcatacattttaaagtctggtggataatttgattcgattaaatctccaaaataatctattttttgttgatagactagtctcttaaagttttcagtattagggacaggaatttgatttctcctcaaaagttccattatcctagggatatttgcataatctactgattcaatttctgcattgcgcgcggattcctccatatttctcttttcaaattcaaaggacaacttattattcgctttacataacttttctaaaattaatttttccacttgttctcttggcattttctcgcctgttatcgaattttcaaagaattttaaaacagtgtggcttcttatcaaatcaagaacatcataattaacacaaattccattctcgccaacgaattcactaataaattcaaaaatagaagactttatttgctttatatctaatggatatacttcaattgtcacattcttaccattataatcatcaatcttttttgtatttattgtacctatgtattcttttgccgaatcaatgcaacctccaatgagagttaatttgtaacttggagagttcgaaatatctttaattaaattgttcaagtatatttttatatcattgatactaaagttatttttcgaggacttaacttgagatacttccaagatagtatcatcctcaaaccatataatatctgttttatcttctgtcgttactggttcaacttggacatgagtccaaaccttagatttcattgagtctagaactgatactagtgcttgaaataaatatcctcttccaccttcttgaccgcccatctttgtccccctttagtctgtgtgctttaaagactttttgcaactttttcctgtgcgtacaaccgttttctacaattttgggaagtacataatgaaggtaaactctatccaaccatttttaagtgattcattcggcactgggtgcacctttaattacttaacttaatacttgggggtcgtgtcttcgagcttgattaatccggaactcaacaaatctatcgcttccccattgcttgtccattattccccttaactctcctagaagaattagagtttcatcaagacgtattaagtttccttctacaggtattgtttcgatagcatctaaaaattcgtcagaagtaactacagactttaccttaacaatcaagtgattaatttttttagaaatcatcggtgtaatcttttcagttggttttttcgttgcaagtttgtttatctcttgatagacactttttaagtgtgtcgcaatatttctgtgttccgtataggtttgttcttcaagtaccgtttttttcattatgcttcctccacaaactttctgtacatttggtttatgtaaagagaaggattcaaaccttgttgataattatccagcatctgaatgatatcctcatcagtaaaggtcaaaataaccttttgatcttgattaaatcttctgtatgccctttgaacatcaagtttgtccttcttcctagcaattaatataccgaatttcccaactttgtcatttaatctattagagatttgaaaatactcttcattatttaagtcctccatgttcttcaattcaataacgataatagtacttccatgcttcgttttaatatcgttccaaaaaccatgactcgacgagttataaaaggtaatatctataatttccctaccatctacagtcgttacttgagaatgggggtcagctagtggtggtgaaaatagtgctgttaatatcctaaccatcaaggattcgtatttttttgcatctttatttcctggtcttattaatgccagttcatccttaaagccttcagcagtatttctagcgatatcagttccctccacagagtctaggtcaacaggaacaactgtttcatatgttgttctatctttttcttgtaaatactgcttcattagctcaggttgttcatgcagaacttctacgacggtttttttacagaaattatacttctcatttatttccttccacgtaatctttggttcacgacctataacacgaacagatttttctacttcaatatcccttaaaatatatctgtaagttgtgttccaaaagtttttgtagtcaatatcctcaaatctccgaactaccgccttcgggactagcaggattggataacccgtgtttggattgacaggcaattctacatgtcggtcatcccaatcatgctcttcccagtcgaagacatgccctagggaaagaccctgaaccattggaatgttatgcattttacactgccgctgtgtatagtccacaaaaaaaggctttgcaatatttgtacacatgtcactaaccatgtcaaatccaacaccttcaattagtaattgcatctcagctaagtggcttaccccatattcgagaatgttaggatttgagataatctcacggtaaattatcttacctcgtgaatctcccatacctcgccctttatgcgttcccgaactaacgcctatcatagtttcttcgacctctgggaaatgtaacattctttgagcgacgtcattacgccccaatcttatttgttcaatcgcagtgctaaagaattgtcgaatcgttgaatgtactgcttgatactctggattaccacttttatagaataaaaaagggtcgacataaagttgtaagtcctcatttaaattcggtattagaaaatcaacctccggctgatggaacggcagccccattacttggtttagtagcacagcttcaactcccctaaaattatcctacatgaatctacacgctttatcataccacaatttggaataatgcttctgagtaatttttcctattggtatgatggaacttcatccgtaaatgttgcatctaaagcgttcgaaaagagtaacagaacgcaaaagaagtactacctaattttaaattttaaggtagcatttcagtgcatcaattttaataaagcccctcaatagctcgtaccttctctccctcttaggacttggagtaaggtagtatcatggtcagggaatgtatgactgctatatccgcattcactctgacaagtcctgtgatgaacgtatgacgtagttggtgggtgtgaaagtcggtcatgttgctctaaaaggtgttgaactcttctaacactacacttaccgtctatcagctatcatacagccccgtcactcagattatctctatatctcatgtaacttcctgcttccgtcgattaagttcgcggtaaattgaacctttgctaacacctgtcatttactcaatttttgttaccgtaaattgtccgctttcatgtagcttgattgctttgtctaacttcttcttatccgtcatagggcgaccgccctagcggcttcaagccctgccgctgtagacgtgtcgatattatcagataggctaacgaacttaacgcctttcttgttcagcagatctagggtttcaataaacttcaatgtcgaacgtgcctaacggtcaagtttataaacgattaaagtatctccttcacgcgacatctctaacgtcttagcaagttcgggggtcatctttgccgcagctcaatcatattcgataatatcggcttatttagttcaggaaagtggagtgaggacgaaggtaaccattttcaaagaaaatcggggcattaacgtagttacattctgtgataataacgagttaccatctgagtaaaacgcatatcctttgtgaaatcaataatgaggaattggggtataacttaaagcccatcgcaacgaatcgcggacatagaacgacgattacttgtgcgggggttgataatcttgaaagtagaacgaacatttaacggaagcaataacttagaggatattctactctcgattattaaggctcacattgacaaactgaacaagcctgaaaactacttaactgagcatggttaccctactcctagaaacagtatctaaagcaggtaatcaaggaactgcatggcatcagtcaagcataagtgtattttgactaacgtgacatatattggagctctatgccaacatcgtgaagaagtagtaagccacatgtctaaagaacgcgttgaagttccgaagataaacagattatctttgagaacgcccaccctgtcctgattgcggtcatggcatgaggttccataaggataggctaaaaaagcagaatggggcttacgtctattgtggttacgtaaagcgtagcaagtcgttttgctcttcccacatcattggatacgacacattgctcgcggcggtgaagagtgaccttagggaactgattggcagtaacgtcagattggatacattgtgcgatgctgtaaaaggaaatgttggtcaaaaacaatctgctttagccaaagagttgcataagttgaaagcaaacaggagcaattagagaataacgtccaaggacctattatcctcctctcaaatcaagtattaactcttgatgtttttccgtccaaaatcatcgtattcatgcggagcaagaagcacttgctaaacgttaaagttgagttgggttccattctcgaagcacaaaaagacacggaagagcaattccgtgcctttcagaaacaaatcgcgttatttgtggcactatcaagattcactacaatatcgactaacctcaagtagtgggcgaattactacaaggggcttagtcattattagcccctttcaatttaagtaaaactgtactctccacatgggatgagtgctgacggtagaatttaatacagattgagatgtaccgtattcaactcttaatatacaggttttcaatctaccaaattaaagaaactatatcaatcatcagtcattgccgtaatcataatcataatcaggctcttcttcaacaagttttatgaactcaggttcatcaattacaattgtaacctcttcatatccatgtaattttaaatcacaataccaacaatgaacctctgtaatatcataaaaacatttaaaaacagaataccaagggctatcgtcactatcttctatatgttctttatcattaagttccccatgggctattgcttcgttattacaagacggacatgtaattaattcctcatcctcatctaagacatatttaatcatcggaggagtagttgaatatttttttatgtattcctgtcgataagattctactcttgactccactatggttttgaggattgccgaatgatcatctattatttgaattgctcgtgtagcttcatcttttcctatccactcttctaacctcttattttgaaattcaagtagtataacgcatacttcccataattgtggcaaaatagcttctaatcttattccatcaaaaggcaataaaccagaatgcaactcagcatttcttttattagcaagtgacatacaaaattctcttttcttttgatcaaactttgtaatagacaagcttgtttgtaatcgatcaaatactgttttcgcctgtatagtcttaaaatcgtcatgctttttatagccacacgctactaataatccttttggatcatttggatctaccactaatgatggatgtacatatgcaagtgttgctttccctaatatttctaaagaaagactcgcccagagtaaaaactcagacatatcgctttcatttctattagaaattcccttgtgaataaaaactttagatttattgtatagatctatatactcaattcccattactatctctcccttattgatattctatataataacctatcaagatcctcagatttactattacctctaccatgcaggaatctccaattatctataattaatagatcacctaaactccatttaatttcttgtatatcgtctttttgaattaatctatctatttctttcaacaactcctctccctcatctgttatggatcgcatacaatctctatccaatctaaaaaagctgatattcgggttatgtaaggtagttaagaagctgtttcgcccatttattactttataaattgtgttggccagtttaaacctaatctcttcatctgtattaatcaactggtatgtgtcatacaaataagttggtctatctcctgcacctggatttttgcaatacaacataatatattttactggtattttaaaataggcggtatctgagtgaagaggaaagctatctaactcgtgagtattactaagtgaatttttatgggcggcttctttcttctttggagagagtctatcaataatatagccccctattctcgaatcaacaggtaggcctatcatatttgagatataaattaattcgtcatctctaagattgggtttatttatttttacgaatccttctttttcaagttgtcttcttatattttcatccatttaattacctcatatcggttatttatttcatttaatatgatgcacctcttgctgatctactatataaattcctcatgatttatgtcactcctgcttagtataaagaaatcttaatttattttgaaatataaataagagccaggtagattgtattgaaagtcaacactcatatagctcttaattcctgttatactatcgtcatcatttttctaaatattacctgttgatatatactaataagcactcctgatttatggacgttatattataagcaattagttcaagattattctgttttcttacataattacataatgttttttggccttacctaccatctcgccattcagtgttaatgtatgcaagcactcagtcgatgcatccagtagggtttgttttttaatatgggggtttgagttaggcaaacgactcgatgcccccctgctacaccaaatagttattttttttgcatagcaagggtgagctgtgataggaatatggcgtataatcgccgaggcctcgcaatagcgacaaactcagcggagccaaggtctggtatcaaacgctccgtaatcaccacgattattgtttgccccctatccctttcgggaaaatgcaacattgaagagactttaaaaaacaacaataatactttagcattcacagaattaaaacagctcctcgaagaatttttgtccttcaaggagttgactccagagatcttgcaccgactaattaatcgtattgaaattaaagcagaagagtttgagaatcttttacagattctcaaatccttctgcttgttcttcactcctcactatcaacgcacagcactccacatgtgtggagtgggtatacaaaaatttatacaaaatggagatagtgaagatacattaaattcgttttgcaaaagttcgtgatggaccctctccacttgaactgaggtgagatactatattctcaatttcaacatcagacacataagcagaaaccaatcttcttttagccccatccttaggaagatagagcatgtctcctctcccaagcaaatcttcggctcccgactcatccagaataaccttagaatcataatgattggcaacagcgaatgcaactcttacgggtaaatttgctttaatcacaggcgataaaacttgtttggaggggcgctgtgtggctatgatcatatgaataccagctgcacgggcaagttgggcaattcgctgaatacattcctctacatccgctcctgttgtcatcatcaaatccgcaagctcatctatgactaaaacgatatagggtaggcgaggagcgctaggatctacagattgtaccctatcgtaatacgattcaatattacgcacaccgtagtggcttaaaatttcatatcgcttttccatctctacaacaagttttttcaatgcgattcctgctcttttcacatccgttacgatcgggccaaacaaatgcgggatgtttgcgtagaccgagagttcgaccattttgggatcaatgaacaaaaatttaagcttatccggacccagactgtataaaagacttatgatcatagcgttgataaatacggatttgcctgctcctgtagctcctgcgatcagtagatgcggcatgctggctaaatctgcataaaccggttcccccgacatgtccataccaatagggaagtttagagcagttcgcgtagctaaaaattctttattctcaagaagtggtcttaaatgaacggtatacggtagtttactgggtacttcaataccaattacgtttgtgcccgggatagggagataaagcgtaatctcttcagccttcagagccattttcaaattcatcttgagtcgcttaaaatgggatatattcagcccttctgctggtaccaattcatatctcgttacacgaggtccataggtgacacgaataactttggcaggtaacttcaaattagctgtttctctttcaagctcagcgaaggcactttttgaatcctggtttgaaggtggtatgactgttgaagatttaagtaaggtgacaggtaacttcaacacatcggtgcttgggtaattccaacacagtttacctgcctggtcaaactgtaatatagcatcaaagacggtatcgcttttattcgattctttggacttatgaacaaatccccgtattaaaccactcgatcccgtttccagaatacgtaggatagtttccttttcaatgactttacctttgattgttttgctaattttgaaatcacatcccgtgttctcccatgcgctacagccatataaaactcctttatcgatgacaggctggccacattttttgcaagatcccaagttttgatcagcggtcacatttcgtttcggccgccgatgtgcttcagttataggtggtgccttagctgggctactggaaatagaagaagtaatctgttttgaaacatctggacattcagtagaattccccttaatttctataacttcatcatgcattgagagcttttgatgtcttggatcccccttaatatgtgtagtatcagcctgccccaacgacgatatggattgtacaggtgagctagatactggaggttgtgaaatgggaatgccgttattagtcgttgctgagttcggcttaactgcttcgggcatgtccatagaatgaacagagttcacagcatcattaacgagcttagtagccaatttcttggcctgatcaataaagctagtatgtgtaaatctcccctgaccaatttcacttaatgtttgttcccacttggcagttgtttcggctgaggataaagcagattggccgatagcttgaataagcgttcgtcctttcacagtgggatacaccaagtttttcttgatttcaatataactctgatcctttaatcggcttataatacttgctctagtcgcttctgttccaagaccatgcgttttgcgcatgatgctttctagctctttatttcctaactgattcccggcagacttcatcattgagatgaggttaccttctgttaaacgcttaggagcagaagtccaggcttctttagcaaaacaatcggtggtgtaaccaacttgtccctccactacactaggaagcagatctaggcttttttcgctctcgtcagggtcatctgtattcataacgagacgccagccgtctcgaatggttctcttccctttggttaggaacgaaaattgatctcccacatacgtgatgatcgtggtatgttcgagaatagcactatcataatgagctgcaattactgatttgacaaccaagtcatagatcagtctttcattatggcttaatctgcttaaatctggagctgtatcggtcggtatgatcgcgtagtggtctgatactttcgaagcatccacatatcttttattattcataatagagggaaccggtttagggattaaaggagtataaggccctagtttacctatgttctcaagaatgcggggtaactcctttgcttcttccgtcgtaatccgattactatccgtacgtgggtagctctgatatcccttatcgtatagcgtttgacaggcatctaagacatctttcggacttagtttgaaaagtttattggcaagggtttgtaatgcggaaagactaaacagataagggggcaaagtctctttagtctccacagatatctcatcgatatctgccgtttttcctgaacaccaagcggccaatttctcagctttaccctgatccataagtcggtcttgattgcctgtaaaccatttccccctatactccataccgctaaagctgaagtttgcaatgacttcccaatagggcgtggatacaaaactctttatttccctttcgcgttcaacaataagtgctagaaccggtgtttgaacacgccctgttgagaagctctctcctttttcaactttgactcctttctctcgaagcagtatggagtatgctcttgatgtatttatccccacaagccaatctgcacatgaccgagcatatgcttcataaaacaaatttttcttttctgatccgggtagaagtttctgaaatgctgcaaaaaccgcttctttcgttaacgaagaagtccaaagtcttttcacgggttttttacaaccactaagttgatatatcagagtaaagatagcttcaccttcacggcctggatcacaggcatttataatttcgttaaagctcttgttttgaatcaatttcttcaagtgggcgaacaatttttctttcccttttgcaggcttcaattgaaagggtcctggtagtatgggtagatgctccattctccacttttcaaacgttggatcataatcctctggttcttttaaagtaactaagtgtcctgctgcccatgagaagtaagctcccttggggaatgtcggacagggcagtacctcgatgtagccccagccttcccctttggttggaaaaggagccgctagtcgttgggcttggtcttttttttcagctatgataagtttcatgtaaacctcctataacgagcaaaaagcacgcttccccatagggagaagcgtgcttcgctttgtgagtattcaattgatttcattataccgtaatcttacaccgaggtcaccctgtatgctgtccagaagcgtgctaaatatgttcttattctgtggtctctacttacatgtgaacaagccatccaaattaaaacccaaatgattaacctttcccatggatagttaatctactactttatgaatgaacaatgcagccttaatgaaggaaagggacccttattcttggttactcccacgaagttcggtgtattttttgtttgagccatatgccttatctactggatacttctctgcattcttcttcagcttttctattaatgctttcttcggatcaatattaagatcgttgcacatgagtaacacataatatagaacatcagccaattcatcttgaagtttgtctttgcttttcgcaatggcttcttcgttacttttccattgaaatatttcaagcaactcactcgcttcgagattcaaagaaatggccagatccttgggattatgaaattgtccccagtcccgctcatctctaaatgcagtaatcttttgtattaattcctccacaatgaaccacctctatacagtcattcgacaaacaacggcaaagtccttgcttacgtcctcttgatacaccgaagtgtaagcatcacataggaagcaggcgcagtcagcgtcaatgctttactcgttttcagactcatccttgtaattaggtgttcttgtgtgaagaggcttaaaactgctcataaaccgtcattagaggcaaaagaaaaagcaccttcttcgaggtgctttcagtcataccggcaagttatctagatctcttgaagaaatcgcttatgttcttttaaatgttcttcgtacttcacatgatccagaaaagttatacattggtccatcagttcttcaggcgtgtgcttcaactttttggcatagataaatgctgatttagccagtttttgaatcactggtgtaacatctgctccgtttagctcaagtgccggggatttacccgtatacgccaataaagatgtaggcataaaagaagctgaagtcgtaactgaacatagtgccatatcatgaacataatgatcattcatattagcgataaaataaaacagaaatggtttgttcttcactagtttttggatccaagattttaactcgggcacattgtacattcttctggcttcatgttcatacccgtcaaataagatgaccacagagctgtgacctttttgttttttcttttcaacgttcactagtacatttaagtaggtttgaatatgtccttgtaaaacatgatctttagttacaactagacgtgttactttcagttctctttctgtttgctcttctccactaagcttgaatggaacgccactatctttaaacagttgtagtgcgaaatttaaagattgcacccgtaattcctcctgttgagatgaccctaccaaagcccatctgatttagatgcagctttgagtctatttaatatgcaattcgttccggcattaactgttacgatcaggaaacaaatttagtataaaacgtgtatagtgctgtaactgtcgtaagaagtgtaacgtagtctcggcttcacttgcgatagactctaacccgtgactcgtaatctgataaatataggtactacgccgatctgtcgtccattttcctgttacatatccctggtcaacttccatttctcgaagtacctcgtaataatagccttgtgcaggctgccattcgtatctttctttaaaaagtaaccacactttctttccactttcttggcgatgttcggcttcagttagaatctttaaaaataagaaccggattaaatgtcgcacgttaattaatcggttaaacatttttcgttgctgcgtattcagttgaatgggttcggatttacccgtacccgagatatgaaagtcaaagtgatcggccatactttttaaactcttcatggaatccatacatgattctttaaaactatctattttcgcataaccgtctgcggtaatagcgtagtattttttattgttcttgttctccgtccgaatcgatgttatccatccgaaagactccatctgatttactacattgtagaaataggatctcgctcgtcctcgttgaatattacttaattccgcgcggaccacctcaaagatatctgaaggagatgccgactgattgtgaagttcacgaaagatgagcaagtacatgatatctctctcactgagccctaagcgttctggaccgagtttaatctcctctttcactggcattagactccctcactttccggatcctttagtttgattacgaacgtgacaaagattgtttattacgtagtgtctttgtgtcttgacgaatgcccatgtatttcgaaaggaacgtatataccacgaaaaagctaattccatatgagaggatccacaccccacctattgcaatcagatgaggaactaaaagagtgccgcacaatactagtgaaactacagcgcctcttaccataggtcctgtcatcgtaggtttttcaacttcatcatgtggtagtttacaatccataagaccttgcatccgagaggattcagctttccacacgtaataagaaattataatttgagatattccaatcgtaccaaagatacggtaaacacttggaggtatcggcccttgaatatgattggccacaaaaaacatgctaagaataaacgaacaaattccgatttttatgaggaactgcatgtggacttctcctctgtatactgaaattaaaaatgcatatcgcaagttgaaaatgcatgttctatcatttggatcaagacggtgctcttacgtttataaacgcaattagaggacttcttcatcttcgaccgtttttgtgcctgctttgttaccctttaaccttataaattattgtatggagccaaggtgtcgttttccctgagtagaaagaactgaatctattcgactatcgttactggacggccgaattgtttaaatgcttgatcctcactatacaaatccatcttataccccgttaattttgctgcgagacgtgcatttagccccttcaaaccaatcgcaagtgtgagctggttattgggcacaatcactcgtgctgtcggatcttcttcatcgtcaaaaatgtggacctcaagtactttagcaggtgctaaggaatttgcaacatactcttccatctgtttggaccatttaatgatatctaatttctctccgccaagttcactggtaatggattgaatagtttgcccttttacgcctacacataccgcaacttcatccacatttggatctagtgcagtaactgcaatcttcgaacggacccccgcttctctggagatggatttgatggcgacctttccttcttgtatttctgggatctttgtttcaaacaacttcttcagatgtcctgggtgtacacgcgacagaatgaccaaagttcccttagatgtttgttcaacgcgagagatatacgctgatagtgtatccccaagcttaaacttttcatttggcatcaagtcactgataggtaggacagcctcggtatggtctagtaaaacatataagttagatgagtccatgccctggacctttccagtgatgatctcttcttccttaccagcgtacgcatcaaacacgagagctcgttcagcttctttaattctcatcataaccacctgtttggccgtttgagcagccaaccgtccaaagtctttcggagtaacttcaatttcaataaactcgtcaagctggacctctgggttgatctgccgagcttggtcgatcaatatctcgactcgttcatcaataatatcatctacaaccattttctttgataacactttcattgcaccagacgtacgattaatatcaacacgcacattcgttgccgtattgaacttctttttgtaacttgatacgagcgcatcctcaagaccctctaacaaaacttcttttgaaatccctttttgcttttcaatctccgttaatgctactaaaaaatccttattcattttcattctccttttgttttctgatttttactaaccaagctaaatccgccctctgtatgcgtatcgttctccctatcgtgctatagatactttcgacacaatcgtattactagaaaaagcttcgatctcgagacagagataaattctttaccgcacaagtacctttcgatggaaacgcaaatctaagcgtatatgtatctgtttctaaataaaatgatgaacgtttagtagatgctaggagcaacgatcgtcaacacatatggagagggaggtagggcaacagaccatcaactgtaaaactcatccatatatacattatatcgtactactcggtcacaggaaagttcttactcatctcgcatacgttcttacttctcgccttttccttcccctttatacgagatcttcaaccctgagacacataaacacggatctatgatctactttcaattctgaaacctagatacgtatctatatcttttctttaaggctagagtgagtgcgcgccgcgcgcaaagggggttccaggttcaataaaagtagcagatttctagatacaaatctaaaccctcgttaaaagggggcaatacaacaggcaggctaaatagtcaaacaaaaaatgagcggtgagaacgtagaagcactaggatgtattaaaagaggtttagtcctatgagcgagttgtacgtttatacgtgttttatggatttgtatagacctcctttggtttctttggatggagctaagtgttaaaggtgtctttaaggtcacctttaggtcaccctattcacagagaggtatagcctatcaacacaacaaaaaaaggcacctgccctttccgaattctacatgatcaccaaataaaagtgatacaaatcgcccttgaaggacgtagaattggaatgtggcgtgtgcctgttccttaaaaaacccatgttactaatgtatgagtagattatatcacaaagcggatggatatttaaagatattctctaacgaaagctaaaattaaaccatgctatattccttagtttgcaaaaattcatttcattacatctagcagctatcccgctgtggtcacttgattagtcattatcgatgcgtatttgaccttatttagtatagttcgagctcttttcaatgtcgtaccgtgataaagagtggtacattgctaatctgaattgttcgtcatgaataccctcttttttaaaatctcgcttttttctttattgggtaccttcgagacggagtagaatactttcgctgaaccaccatccacctgccggtgtttgaattccaattgccaaatcccagttattttgcactgttcccgttttggggattataacggcaggaatatcattaaaattatctcgataaagactagctactttatttagcactcctttatcaaaaaaggcatctagatcaggactattaaagccatcgacccgaaacttcagataatcataagtattatatcttttaggatctttgttaaataccgttccacctttgaaataaaggacgtaaaaactgtttttctggtcttttaccattaggtttttgtttgatggatcattattgaaccatttgagcgtattgatcggctttatcaatccaaggttagggtcgttgggatctgcaaggtcgatggcgataagtgcgtcaagcttgccttgatagagcccgtcttttgacgtgatcgtcatccgttcctcgttccacatttcctccaccgaatcttttctagcttgtctcagatctgattccgttgttacccacatttccggcatcacggtgaagatgtttgtaccgtgccaagcgatttcagcactaccgaccgcatacctatcgacgtcaagagaagcgccggtatttttggaaagaatacgttcgattacaacgattgcctgcgcacgcgtggtcagtcctttcggagcgatctgccctataccgacgcctttaatgagaccggctttcgtagccagatacatccatttgtcatcttcctttgttgtttccccgatcgcacgagctgcaacacgagccatttcttcacgtgatatgactttcgcccaagccgcttcgctattgttgaaatcggtagatgcgtaaaggcctgcttggcttgcggcgtcaacgtactcggtgtaccatttaccgctggatggcgtagtttcaagttccatagccgaaacgaccatcttcacgaactctgcgcgtgtgacgctagcgtctggcttaaaagtaccgttcgtgtatccatcgacatagcctttggaaacgccattggttatggcactggcgccccaatgggtcgattgtacgtcggaaaatggagttgtagcagcttgcgcattaggtgtcgtgatgctcatcgtacctactataagtgctgctgccagtgcgattcctgcgaatttaataaactgttttttcataaactttctccttttaattcagcgctcttgatttgggagaacacccgtctttattcattatcgtcatcatgggtttagcaatttacttctctatattttttaagtgtaatgccgaggtattctctacacgatatggatcaacatagtgatagatcgggccttccaatagtaaccgcaagaaacactatctcagatattggattagtacaagtaatcagcttattgcttctgcagcattttctacatatttcttttggatacgcgagcatttcctgcacattgagcattcatggcagagctcgttatctttcacccgttgaagtactttatttgggaacagctgcagaacttcttcagccaatgcttttacctgatgtgataataacgaacttgcttctcatgcagtttaaaaataaagttgcgaaaaaaactctccttggataaaattgtctaggtatatgccgatcttcgtcctgaattcatgtaaaaggaggtgaatattatgggacgtgttcgggtatgggttacagatgcaagatgtatagattgtgaaggaatatacaagatagatccttacagaccgttgcaacaaagatgcaaaccctgttccaaagcttatacgaaaaaaaggaaacgtaatgatagagtgcaaatcatttcttttcttatctttcctttgggcattctaatgtattttctttggaaagatacgaaaccacatttagctaaaacagcgttaagatctgctttaatcccaatttacatattgagtggtattcttctgttggctttcctttttactagaatgatgttaaagtgactgcgagaaaaagaagtgtacttggccatatggatctttatgtattatgaaaatcttcatttagacgaacgtatctacaaagccctctggcctagccggaaggctttgatctttattggagcagaacgcgacgtattcgtcttcctcacacgctaataaacgagatggtctacattgagcgaggtaagttgaactactcgaataatccgattaatggtgtcttgtgtttcgttcgtactacttgagcgttctcagtaaacacaacttcgctgtaggaaggatccggaacagaatatgtggtgtacttccaccttaagaaataccagaccatgagagtgcataagcaatgatagccaaccgttcaggcatgactctgatagtgaagatgttctgattgctcttcacactgaagtatcttcacttgctctattccgaggagcacttgtttcgaaaacttttaacttgttattcattagccgccccagtacggcgttattcttcactaaatcaccgtacacacgcgattccatttttatatgggctagtatattttattatcgttttaccccattggaatatctaagtaatcaactgctgtatctcatttactaagcactgtttcttgatatagaagaaaagacttcctataaggaagcctttgaagagcgtcttttaatgtaattgggttctatctaccgtttgaaagtaaggaataaaattaataggttcattccaatccccaattttaaatccaatagatagtttattctctgttgcagtctcgcgtttttctggtctaaatgataagcccacgactttaaacacattaggacctttatttaaataacgttcgggttctttcatgaaaaaattcctttctgttcatgattttataattaagaaatcattgttattattacagttttcctagaactatatgaatctttcttatatgtaatacaactatatttatctcagtgtctcatgaaagactcattaattgtatgcttttatatatttgtattttattctaggtattcagaaaagacaaccctataaaaagggttaccttagctcttttgtctaggccttactttgtattattcactacatactgcagtaaacaactttacttcgtaaagttcctagacaaataataaacgttatctctggattttttctgtactcaaatgcttcataatctgaagctactttctcaatgaaaatcttctaggaactcacgttccttatgaagactccattctatcaactactgactgatttttagaagttcctttaaatacttttgcatattgggatttgttgcatatacgtaacaaccatttatgccacgtgacagtaagacataatagattttctggatataggattttaattcttcgttattttcgtcagtacctttgattggaagaccatttcgatccttatacttttctggatagactataattcttactttttcaaaatcatagcttccatcttcttcacccgtataattacaatcaatttcctctccaaagatcacgcctacataatttagatctgcaccttgagttgtgtgaatacagcctatttcttcaacactattttcttgattaatccaacctattgttctagagttccagttaaatgtgtcacctgtgataggatcacttatatcatataaattattgtctttttgtgttgcccattcccaagaatatcccgcaatcactcgacataatttatgggtcttatttagtttctttatccccttgtgtaattccgaaatggaatccatcactctaaagtcataaccttttagtaatcctttttcatacacagggacatctgaagccatttgcagatattttctcaaccatgctaaatattgatcccctgacttcaaccggaactgtttacgtagtacatgtctacgataatctgttgtcttttctttaaaatggtcggagtctatatcagctggacgaatagtttgatactgatcatacacaatggttagatgatgagcgtagtttgatatcagatctaattcggttgtaaacccatccgaagtgattagatgttttaaatctctcgcttgcttcccaaaatactgttttagccgatgtgcttcatctacaaaaacatacttatattttgtatctctaccttttgccttcttaataaagtgtgaaggggataacactgtaattccatgtaaaccaacttttcgaactaaatctttatataagcctaatgaatggttttgtggaatgatgagtgcgatatcatcccgttctaatccttcacggtccttacccgttgtttgatcatatacgagtgtatatagaagattcgttaaaactactgttttacctgtacctggatctccagcaatcagatgtctacttttagatgtacttagcacggtatctaagatgtcacggctaatatcaatttgattggctttgagtttcttaaaaggtgagtatttatagataaacttattatgtatctcttttaatggttcacttgctattccttcatgaataagtttttcccatatggttacgaacatatcgtttacatcttcaatcccattgtacgagtgaatattctggcctttaatcttattcagtaaattgaactgggcatctgctagcaagtaatcaattaagagtgtttcgatgtgtttaatggagctctcattaaagagatcacttttaataatcgtaatgtcagtaaatgttttactaatatcttttagatgtgtagaaaaacgaccatatacgtctgtagattttcctacatagagatttttcttatctctttggatatacacgactggaactgtatcaatatcaaagtctttaacatcaaaatgttcaaattcctttcgtgttttcttaagcatttcaaatgaatacagtttccctgcgagtatcataactaacacgtcactttcattattatattcaagacatttaactctccaacattcaactcggtgcttctataatcagtagtatatatctctcttctttgcctacttctcgataccatacatttgacatagttcatctaaatttatctcaataccaatagcctttaatttctcatgtcgatcgtcaaatagttttcttaatatgttctctttatctttgtctgttccatgatggatctgacgatgacacgttggacataatgctagaagttgggatgctcgatccaaactaacattaaaattcctttgatatttcatgggtacaagatgatgaacttccagatatctttctcctgtaaccttcgaagtaaacgaaacatgtgtttcatcgaaggcacacttgaatttagataaccgaagcgccttagcggcaacttgagcatctcttggccagcgttcttttttggtctgatcaataacaggttctggttttggaagtggagtatcctccgtctctatatcctccatactattcttttcggctttctttaccttttcatcaagtatcgattgcactctattttggaagtcttcttcttgttgctgctcttcttctaaaaattgaccatcatcacttaacaataggtaatcattaaattgctcaagcgttctttcaccgatcatatattcaatctcattatatgtaatcaataattccttaaggtcactgataagttcctttgaactaggtaagttattggcactataaaaacgtccaagaatatgacccttttcatagccctctgctagccacccttgtcctcctaacgtaatggcttctgcagtcatatgatctggagtaaagttcaacttcttttgaattatatttgcagtcgtccggatttttttccgtcccagtttggtctgatacttttccttaaaatatgtccagccttggtttaaggaaatatacacaccgctcatatctgctttaaacaaataaacaatgtaataaccttttgtagctgtggtggtaatatctctattaaaaattgaaatccacggtatttcggcccatcgtccgtttccaacggagcccttgacatagaaatgatcttgatttaaatttgcttcattaataatgatatctttaaatatactgcgtacgtggttacccatcttatggttctcaaacaatgacaatcttgcttcctggtaatgatcgagtatgtattgtatcgcctctctaatgtgtagctcacctgttctttcgttagtgttttctgtttctaatcgattttcaataagctctgacacatgaatcacctcagtcacgttgttatgattattatcataccaggttgttccataaaattgaaacatgtgctttcctaaatgaatagatagaaatttgctcgatattgaaaactctttacatgtaatttcaatcaattcaaatctactaaacttcatgtattacgataaaactgttgagttgaaacgaaaaagagactgcccaagagtaaagaaaattcaagggaaatctctaatcagatcttatttatgaagggtttaatataaactctgttgccctattcattggcagctaagtccaatatatcaactgcttttaatgtataggacattactcggttcttgcctgccgcttttgcctcatacatagcttcatctgcctgtttaattaagaggtcggctggcacacttgggtcatacattcgataaccgatgctagctgtagtgattgtttcattttcgatacgggatctcattcgttccgtgatctcttccatatcaacgtcgagactttgaataagtaaaaccatctcctctccaccatatcgtccagccacacctatgccctgaacctcttccttgaaaatagttgccacttgcttaagtacttcatctcctactttatgtcctttggtatcattcaatcttttaaaattatcgatatcacagaatataacattcactggaatactccgatccacacagccattgatatacttagtaaaataccttctattaaatagcccagtgagtgaatctgtaattgcggaaacgtacgagctttgcatgatgatcaatgaatgttcaatcaggttgaccaataaaagagtgaacgaactgacttcaaaaataatattgagcatgtaaagagatccatgtaacgatggcacgatacttatagccatggagatcagtagagaagctagaaataatccagaagccatataaatggatttacctcttcctaacttatccccatataaaatcatcatcgttacgatcgataaaatggctatgatatgtccgagtataggagcaaacaaaccggtgagaatcacgacaatggttggaactataaaaatgagttgaagtttaaggttttctttgttatgtatccggtagaagccataaagaaatataatgaacgtactttttactatgatgttaaagaaagaagaaattgcatatgattctattcctatagtggtggcaactaaactgaagatcagtattatcccattgaacgcaagataacctagcgtgattttagataagaacatgtatgattttcttttccgcttttcaagtaattgcctcgataaaacccaagacaatattaatattggaaaaagtagaagtgatgcaatgaagctcccttgaatacccacaaaaaaatcaaaaatactcataagtcttgcacatcctttttattgatagaaattatcaaaccagtcacgatgtaatttcgttgggttcttgaaatattgaacccacatatacaaccattcgttttttccttctttgcttgatctccatttctgtctctgtgctattacaaatggaataaaaacgggtgcccatagaatgcttccacttaaaataaaatacaacattccctttggcgtatttaagatcggatcccaagcatcatgctgagcatctaggccttttgctttggcccagcagaagaggatgacataaaggacaaacccacatacgacataaaaagcaggtattacaaattgaagattaaatacgaacaaaagcagtatcacagataaaagcaataatactttgttgtgcttcctcatagttcacctcctacattgttaaagaaataaaaaaacgcgaactatccctaaggacgttcgcgtgcttcgcgttagcatatttaattgttctcattatacaacaacctctcttgttgctcaatcattctctgtttattcttagtgaaagaggtcgccatttatgcactaataatttgatatctggttaaatctcaacgttgtcagcagggtacgtgatcctttttcaaatcattacatccgattataagccatattaactaaagcacactggacaattacagtagagttcaatcaattcacatcaagtgcttttcgcagagccatatcggctttatccaaactatcgttagcattttcaatagcattttttattttggcaaggttcaatatatccttccagttacttttgatatctttggttacctctttaagaacatctgtagcatcggttttcagatttgttaacccatccacatccgaaaaattgcgtagagaaattcgatttgcaaaagatgagatcttctcagccattgctctatttgatagagttgaggacaattggtcaatcacttccgattcctttgcagcttcttttagatggaatagataatctttgataggttggtatgcattattcgttttttccatcagtagtatagcatccatatatgtgagcttttcatttggattggaacgaagcgcgtaaatgccaaaatcactgagtgttttaccctgctccatactgtctacatgcattacacgttttagtatggatgctgcatctacagttgttactggctcatccggattgactacttcatcctttaatactaaacctacatgtattgaatattggagaacctctttaaactgctcatcctgacttaactcatagaatgactttgccagaagcacggctttaatttcagggaagagaacaatcaggaggctctttaacagttgctctttggtgattagctgctctggatgaaactctccttggagaatccctaattctttgctcttgcttataacgtaatttttcacgggatcaatggataaattagaagcttcagtttgaacccacatccctttatgttcttctttagccttagattctagttgttcaaatagaccttcccagcgtgtattaggtgcaatcgccatagaccgagcaaatccgttggagacgagagctgcattgaagaatatgccatcttctaggtatacataagcaagtactctaccatagggatcatcagtctggtcccgagatacataaactgttttacctatcagttgatctttagtgtattttgaagcttctgggccataaaattggataggcccatttaggacctctggggtatcaacaccaattaaacgaaacacagcttgcttgccggcacttgtcccatctgtatattgcccgacaaaagtatcgccatcttttacacgtgtgaccttaatcttttccagtggagtagagttgatggtcacggtttgatttttactcaaccacccgaccgtggtacccatactctcactaataaaacgaaggggcacataggtaacattatcaatcatgacgggggcttgactcagttttaatgattccccattgactgtggcatctttcttcccaatgaccagatatacgctttgttctccctttgtagcttcaatggagtaattatctttgttccattcaatagctgcacctaacctctcaaatatcgtcctcatgggaactaatgtatttccatttatcatttttggataaacatcaaaatgtagtttttctccatctacatacactgatatttccttctccacagctgcggcgctcatttgtaatggtgaggataacgaagttatcgcaacgatagaactaatcattagttttttgaacatcttttttcctcctaagcaaaaaaaagaacgcacaactcctaggagtttgcgcgttcttcgtcgcttcatatatttgattaagcttattatatacaaaataatgtaagctgatcaagcatatatcagttgtataataaccgtgcacagcgtatctctcatggtatgattctatatcatcacaaatacttattatccaataaatcgatgagatcgtctccgaagattcaattaactcaatttttgaatcagtgttgtctgatctaatttttctataatagattccagatcaattgttacatctaccatatttctaagatgaaatgctgctttattatggcctaatatggcaagtactagtgttccatttttcttcgctcgtttaatagcaggtacgaaatctgcatctccagaaaaaacaacaacataatcgtacttatatacagagaattgataaagatccaaacagatcaatacatcaacccctttttcaatatagatatccttctggatatcacatgtaccgcgatacacattaatcccatcatgttctagcgcttgcaagaacttatgccttttattatatctaatctcatccgcatgcttaggtggtagagctccatagaaattaaaatccgtagacatcttcaatccatagttagatttcaaatattcttcaactacttcatagaattttcgccacgaacgaatgcctttgattcctaattcaagtaactgataaatagcattgctttcatcaatgagaattgcacttttgagacgtatccctactggtctcatgatcttcaacctacggactttctattcttagagattctaagaagatccatgagtggcaaacctagacactccgatatctgaagtaaatgctcttcttttggaaatcgcacatctcgttcccaggctgaaattgtggttttatctacgcccatttttaaggccaactgttgctgagagtacctttttgatagccttttaagtttaatgtctgctgcaatggttgtgattggtttaattttctgtacgttcataacattcacctctggttcatttgtttagctggataatttgttgggttagaaacctaaccacctcaaactcttgctccttcatttaatcgttgagttgcgcccgcataaagtacagttcacacaaaaaagcaccgctagacgtcttcaatcgacgtagcggtgcttccacttatttaatatttgattaccgtaagtatatcatagccgtttggataatataaggatcaattaacaaatgaataactggaagtatcgataaaaagctctccagtgtatttcctgctccttgtctgagcaagataggtatataagtgcctttctcaatgaggggcttactagcttgcctcaatttaaattgaaagctacatatatgttacttggatgtaggggtcaagatattgatgttttaagtttatgttctgatctggaagttagtttcatatcttttaggtgatggagttattttaaaacatattaaaaccatttcaaaacaccatcaattaataccttatcttaatgcatttatttaacaccatagattaaaacctttagttaatacctttttataggcccaaaaaaacgaatgaaacccttgatatataaggcttctaacataagcttcattttcgaaagaatagactaaaagctgaatacactctgctgtaagctatgtccacgaaccaacaaaacttatcaacgtttagcctaaagtaatccctactctaataaacgatataccatttgaagaattcataatcaacaacgagtatcactttatcaaagatgataaacacgttatccacaggtattttatacagttagtatttaattagatgaaatatttaggattgattactctctcgaaagaaaactccttaatgattgtaaatattattcattttatctcatgacaaatagcagtcactctacggtttgtagaagtcactgcatcaaaatttagatgaattaggattcaaaacaacttaaagaagcctaactttgttttcaaattagaccaattaaactacattatttttttgttttgagatgaatttttcgatctcaagtttgatctctagaataggtgcgggtaaggtttttatctgataataacgttgagcgaaccattcagggttttgtctaaagcgactaagccagcagttatgtagcagacgaagcttatcccaaatctcgcgttgttgttcctctgctgtgacaatcagatcttgattcaactctgagagtgcatcattaacaaaaagctgagtttctgccatgtgtttcttctggtgtactacttcaaggtccatggatagctgtactgcatacttcagctcggctgattccatcacagaccgaaagtaggcactgatctcatctaattcattcttatcatcattaacaatatactcagagtcttctcggtatatcatattgaagaaggtttgagagcgcatcttatttagctgaatattaaacagagctgtgtcaaagatctcagtggcatattcatagccaaatttagcatagtagtcttccatgacttttgcgatctgccacactgctttgcgtgatagaaagtcacaacaaaaacgatgctttttaagctgtttaaagacccacagctcagcaccctcagaatagacttcccccatatcgatccatttttgatgaacatggagtacttgaaagttttctgtatgtattttaattttcagatacttggaagcttggataagaatgtttttcgcttccttaggcgttcgaatattaagaagcccagttggaccataaagatcattaatataaccccagcgaaagtttcctgggatgtagatcaattctttaccaacataatggagaacaaaccgttgaacattgcgatcttcagataggaactcatcgcaattgaaaaatgcaaagttcttcgcatagaggttttcttgggaaggctctgcttgatctcgaacaaagacgtatcgattaaagaataggtttccagaatcattgtagtgaacaatgccctcaaactctaacttattaagaaggattcggatacggtatgtggaggtgcccatacgctttgcaagtgctgttatgggaagcggaacttccccaccatatgcgcaaattgtaccgagcagcaatttaagtttgaataacaaacgagtatcattgtggagtgtccgtgcatcaaatagatcaggatggtgtttcatagtgtgccgctccttaaatccaaccggaaaatggtatgggaaataagaggttttggcttttttttctgaaaaagacatgctataattgaggcatatccatttaagaagcaagaccaagacccgatttctcgaattctatctaaatgccaggtcgccaaacttagccatttagtagaactttgtggttgggttctttttttatgctgatttttatttcgacagttaatatttcgagtaattcgtttatgtattaatagatcatctaagctttaagcaattatagcactgaaaaaattgatggtaaatagaggtaagttcagcggagatttgggggatttatgaaatatcccttggagtataaggtctaacaatagagcggagatttggagaattatttctgaacccctactcaaacagtgttttttgggaataatagataaaaaaaattattttcttatctatacagcggaaatttggagaagtttatcttactatttaacaccattagcgatttatatattgaattatccaagttcagcggagatttagggaattattcactgttttacacttcaaaaactagtttttttcccccaactgtctttaaaataaagatagaaatgcgaacttcgcttatattgagcggagatttaggtaagaaacctttttccagcggagatatggggatttttttaggatcgagcggagatttggagtaatttttgtaccattttaaaaaattcccccaagttttgagcggagatttgggggaaataaaaatagagttagttatctaactctatttagtgaatattagaagggtaaggtcagttgctctggctcattcataaaatgattgatttgttgattccctagcaaatcctcagcttcgtaaggtttgaccgggagaaaagtaatgtgaaaaacatctttctttcgtacatatgactcaacggtgactccatggttaacaaagtcatttaaacactcttcaataaatgagagattgatatctttccttttactgcgaaactgtattttgtggataaagtatgtgtaatcgaattcagcagtatatccttgctggcgtaagtaacaaagaaatctttccttctgcaaagggaagattaaatgctccgacatccgattttcgaaatgaattaacttatcactgtacgctcgaacgacctggcccatcatgtaattttggtgaatatcctctgcgatagtgatctctgccatttccccgtcaccgaattcagtaatatgcaatcgatcgaaaataccaaatacgagtgtttcattatccgagataacattaaatttaacgttagcgagtttagtcaaacggctctttacggaaagatagttacttttattatcagaaccatgagttcttctgactaaatccccgatcgttacgtatattttgcgctcttcgaaaaatagtttacgatctcgcatcgagagtacggctctaaacaattttgaatccgtttcatcgatggcacgcaaaatttggtcttcattaatgatttcttgattcacaagtgtcagtaatgaataattctcatcaggttgatattcactgatataatgtaacttgttatcgatgattacacttttcttggttaatttcatacgtgaccatcccggatttacagcggcatgatccgtatataccaggggttgatcaatgataattttgttgatgttcccgtcgaaattttttataagtatgtctgcgatgattacaatcgtatctgatttaattgccttttttatttgtaaaggcgttttgtctttaatatataggtaatcaatgagtcttgacgttttgtcatttgcccatgttttgacttcttgaactcgttttgcatttaactcctctagcgtattaacttcataaatttttatgaattgctccatgccatacatctcaatgagttcattggcaaggtcaagttccttcacgacttcaacacgcttgttttttactttagatatatttgaaagctcttgaagagacttgagccatcgtttctttgttttttgaagttctttaaatgtattccttcttacctcatgtatgttggcaggtgtgagctcagaagaaatgatgtcatgcaggaaatccctgatgtttccttcattaagtttattatagagctcttcacatctaaggcctaactcatcaacaacttgattgataaaatattgcggtatatgctcttccatcaaagctactcacctccagcactatcataacatagaaactcttggattatatattggaataaaaatctatataggtcccagttttggttccaaaatacgatcggatgtaagaaaagagcgtcacagacactcaatgtttgaatatattagttagtcacactttgagtcttttcagaaaagtagtttctttgaacttattggtttttaattgctccacctatatttgtacaatcactttcaatcatttatgttacaaatgatatatatgatcttagatgaattagcccgtatagaaactctttgtaggagaatagataaatcatactgacgtggctataggaagagaacatatggaacatttcatacatgtcgcacgtttgactgcctttagtccagaaaactgcgagtcagaaataagaggcgaccagcaaattggcgccccctacaaaatttgctatgtaaccgcatgtgaatcctctttagtgcgatttcaaatggtattccattatgctgtgtgaatcgtttatcaaactcaaatatcttaacccggaatagttgctaagctcattgctggtgtactggatgtttccaaagcaatgttactcattaacctcatcattagcctcaatattcttgaaaacttcttcaatctcagcctttcgaacaatactacttgttgtttggtactcttcatagagttcagtatagtgatttaaacgctctaactgagccttctctgtttcagacaacgactcttcgttatattgctgatattgtgtttccaactcagtatacttcaattgtaattcttctttttcaacgatactatccgttagataatatagtcgaagtatctttgccattaatgtttttgtttcaattagtttgttagcagatgagctattttccatgtgaatccctcctatattaatatcatatcacagtctaaattctcccacaaaaacaaaaaaagcctaagcaaaatttgctcagactttctttcaattcgtaaacaatcctatatctcggaaaagacagtgttaagacgttttgggacataagcctcttactctatatgtcctcaagaagtcgtttaattcttatcagcactactgccaataattttctggtacccctcatccaaggtttttggatcagcatcagtagctttgctaagtgcattctttgctaagtatgttaaaccattaaaccctgcaagtacagacgtaccaacaattttagcataacctactggttcgaaaaacgagaaagctgcaagtgccgctgccccaccaatgaagaaatcaaccagtaatccaggaataaagaagcgttttttacccacttttttaatgtatggtaataatgcaccctcctccagtttagaagcaacagcaagattagtcatacctcctacgagaaaagcaattaataattccataagtatctctcctttataattggataaaaaaaacaccagaatgtagtgtaatttacactcatcctggtgggatacatttaaaaatctcaacaaaaaaaggccagaacaacaaccgattctaaaattaagacacaagtaaaaaaactcgagtcaatagatccaatagatctttagaatgcggatagtcgcctgaccttccgaaagtttaagatattagtaaatgatatacctttattatacttcatttactaaataatttctacattaaaataccttgaatattaaacttttctactacctcagaccgtgtccaaccgataatgcattgtctacaacttataatcaggttagtatttcattagcaataatataataggataatattcatcctattatattattgttgcattgctaggttttgacctgctgagtagacatacattaaatcatcaaaagacgacttttcaaaattctgaacaattccagtaattggacttacaagatgctccattttgcagagagtttcttcataagtctcacttcgatgaccaatttccaacaaaggtttttcagattgagatgatagttttataggtagtggttcaatagtagattgattcccacattttaagcactgtgggcgtttagttacattatggagctgagtctgataggaatttatgtcatatgtcatgatcttaccaattagtttatggctcttctctaaaacaagagccttagccagttccgtgacaatcatatttaatccggtattaatggatgaatttaaaccgcaaagagaagaaccaagtatttgcccaggagcctttttttgaatggtatggaaagcagatctatttgtttttagtctgcgctaaatattcataacaagcggttacacctggtataatgacaggtccaatccaaagcatatttcccacaggcttggctagatgccaaggtggattatctcgcagggatatctcgttaaaggcttccaattcgtaatgtaggtaatcatctacaagcacaacattaaaatctgacgaagaactcattgtaaaaagcatttttctctaatattggagtaatttcttcccgttaagatttccatagctgatgatatccacttttttatttttcggcttatggtgggccgtgatttgtatcaaatctaaactgctccaaaaagccatttctcttgaagacatatcaacttcatatgattcgattagatatccttaaagagacattctatttgacacagtggaagctcctaattttatgttggttgtagtcttgtttgttaaatattactaacagcatattcactttcctatctttatacaaatcagcagaataccgtctaactccattaatcatttatccacactaagtaatagttcgctgcactaacacatcaatgcatagaacactcttagccttcctctactaaggatcatacttggctacgaatttactcaaaagacacaaaaaaagtcgctacattgcgactttcgaaagttttggacttatacaattaatagttgtaagaatttgattttggattcattgtatactctattccatcattttcaatacctagctgtatagcatgatatattctgcagaaactgggtatctgaaccaggccagacttgcctttgatttttttgcgtttacaaacatttaaaatattgttattagttaaattaaacggaaaataattttgaatattgtgacctttataaacaagcaacttctctcttaatttgagagtgtttagtatagtagatactaaccaaccatctagctcttttagttgtttttcatcattaattaaggggtaaaaactcattaagcctttaaatgttaatctcttgtagtggcctaataagtataagcgaattaattgttcatttaatttaccatacatgtatcttctaatttgcataatagctgtaacaaaagcagggtcctcattattattaggtatagtcacagctctaatcattgctggttttacaggttgaatcaaatttctgtaaagaatataactgatttgttccttgatctcctttaccttactatcctttatactagtcttttttcctgagagcttatagccaagaaagtcaatatgatattttatctctttgaactccgcaggcataccatcctgactcaataggctgattccatctgatttcatgaagtttatttctattcctgtttctactgaaaaggaatgaattatctcgtaagccttagttattttttcgtaactgtttgaccaaatcactgtgtcatcagcataccttgcaaatcttaaaccctcgtcttctaactttctgtcaaggccccaacaagccaagttagctaaaaataatgagatagaagttccctgagggacacctttcatagttaaggagagaaatctagaaataacatacctttcaaatccattcacgataaatccattcttatccatttgagaaaaaatatatgaatgatttattgaaccaaagaaatttttaaaatcaaactcagctatgaaaactcttggatagtttttaagttcaatggaaatatcttgaattgcaaaatggacattcctatcatccctgtatgcataagaggtagagctaaatctatggcgattttttttagtcagtcttttatagatatactttgatacaacagcgtccgggatttgaaagataacaacctctcttttactaccatcctttttatctacttccataacatatggatcatgaggagtataggtttcatcttctaatttcttagccagtgatcttgctatttgtttgctatgtttcttaacatagaaagggttaaattttttatctacatcccaatatgctggtaattttatttctttctcaggagcattatgtattctttttgtatttcttatgtattctaaatgaacagcattatgataatcgtgatacctttgtcctaatttgtcacattcttcctctatcattttctttaatgtattttctaacacaaaattcccccccttattaaaattagaaaatacaaaactctcgcaaggattgcgagagttccacggacgcacaccacttaaaaataggttctcacttaagctgatctttgaaaaatcatgcttgctaaagctaataataatttactagctcaaaggggctaccgtttgtctcctaaagacatagtatcattataccaaatttctatatattaacaacaaaaaaatcctgaatcaataaaataatagcaccctattttcctctctacatgagaagaatgatttcttctcatattcggtaaactgcttatcttcatgatatttatcattacatgtagattttgctaaattattcaagcgcttaggagagcccttgtttcttaatacttaaaaaggctcaactgcaatttcaacaacgccactaatatagaattataaaaacactaattatgcaattagaatagtacaatccccttataatttagttcttaacatagcttttttttcaagcccccatatcggtggagtccatgaatcagttctatttaaatttttgaaggcatcttctaccatttgtaatttagcatctaacatgtcaatataatggagcgctacagcttcagcaatttgaggctgcactggacttccccattctccaagattatgatgagaaagtaccatatgttggagatacattacagttgaagaattcggatcaatgttatttttaattgctgcttcaactatccaatttgaaacaattgaaatatgtcctatcaattttcctttatcagtataatcacttacaatccccatagttgaaagcatttcttctgttttgcctaaatcatgtaaaataattcctgcccgaagtaattcagaatcaaggaatgggcgttgttcacaaataaacttagagatttctaacattctgactaagtgataagctagaccaccgtaatagttatgatggttattcttagctgctggtgagtctaataatctagtttcgactttatcaaaacagtatgacacaattattttgagatctgattcttgaagggtcttgacattttcctttataatgttaattaattcaagtgatgagatcggagctgtttgaataaatttgttaatatcatagtatttaggatcagctttctttatactagtgattttcaactgcaatttattactaaaattatgaacaacgcccttaattgaaactatttcgtttttttgaatagtttgtttttctttgaatgtggcatcccaatattttgctggtaaagatccggaagagtctcctactatcagatctaagtattctctaggtggatgagtacttgtttgttttattagtaactctctgactaggtaaataccttcaaactgttctcccacagctaacatatttatcaatgtcatatacaacacctcgaaaatttcatgtaaatacaatatttccgaaatataaacattgtattcagaatggatttaagtctacaaaatgaagtaactatctgtatttatatcaataatgtcgataaaattatcacaattaatagttttactcaacccaattttaaaagtgctgtctgatgagtaattaatatcaagatgatttaatggatgcatcttaccattctcatgtttttcatcataatcgtatcttagataaccagattcaaatgatagcattctttttaatatcagccatatttcatccttatgaggcttacactcgaaagtttccataataagcatcaattcagaatctaaatctagaattcctttataatcatcctcactaaaaatttcctcatatactgtttttagaacagcgaagttaattccgtctaattcaatatttgtagctgaatcgtaaatgataggattcatactctcaggatttaattcaacattaaagggaaaattaaaagagaaaattttgttttctattacaaagaacagacgcttcattttatctattctcaatagtatataattagtagaactcccttgaatcaactctccatttgtcaataaagggatcgcttcaaataaaagcttaacaatatgatttttactcctaataggacgggctactaattcaacgagatgtctagtcattctgactctaaattctttcatggccacaccttaaataaaatcaatatttttgctaatgattgcataaattttatctacatccacactatctttcagcataacattaaccaacctatgaattttctccttaattgagagatctataatttcgaagtcttgtaatatctcttcaactatatcatattgagacttgtgtccttgcgattcaagcatcagctttgatgtatccattatctcatcaggattaggttttttaaccgttaaaatcccagtctcaactatttcacttgctgcttcttctagtcttgaattaagctctccattgtcttcagaaagaattaaataactggtgataaaagatctcgtcagcatcatatagagtgagtttctaacagttgtattagtgttcaacggagttgttgttatacatattatgaatggaaattctaaaccttttatattattacgattacttataaacaaagtatctttcttcttatttttaagttcatagcccttgacagatgaccatccaaatttcgcatcaatctttattataagttgctcaacaaggttatagttttgattactgttttcaagaaaaacaattccgatatcaccaggctccactgtcggattttcttctattatatgatcaattgtagatatcactctctccaaatagctttcatccttagcaatacttaatttaatactggtgatgtcatcagtaatatcatcaaaccttcttaatggttctcttgaaaaactataatcatccccttctattttaaggttatacccgcaagctaaccattcttcatcattcaaccaccttacaactggacgttccacaagtccaaatcctaaagcatgagcaaacatcaaggttttaggatctgtcctataaactctatttaacagaaagtctggagtgttctcagttatttcagtatagtcatagatgctttgaaaaatatcacctgctatatacacttgtttttttgaaattttttcacataatttaaaaaatgcttcattgaaatcttgactttcatcaataagaatatagtcaaaatatggagtgaaattcccttctttatccatttgttctagtctattcaaagcttgcttacaaacatattcaaaggatgttgcccaactatacctttgaaaagggatctggtagtaggtacaaacaaaactatataacccagagttcttatcaagttgtgatccccagcttctctctacccagagtctttcatgccatttaatctgttctcctactttcataaaatcgaagaaatctggtattctttcttttaaattctttgacaatattttattaaaacaagtgaagaaaattttggaatcctcttcattaacataaatatcttttaatttatgcaacagtagctctgttttccctgtccctgctagaccttgtatagttattcgtttctggtcttgtgtcttaaaaataaatctagtttgttctccatcaaataagatgatatttttcttaacctgttctaaggaactatcaggaacatctccttgcacacgctcaatatcatttatactccctgttaataatgatactaaaagttccgctttacgcgatttcaagccacttaaagaattttcactaatgattgaggaaatgtctcctgaaaaatcagaatcagcgtggattaaatcatctctccattttttgggtctccccaagaaacttttataatcatatttatctgaaatataacctaaatcttccacaaaatcatcaacatagtcttcaaaagcatcagattctgctccaaaattaagaattaaaatttttaccgagggaatgagaactacgagcgcttctttaaatacgtatttatacttcctctcacttattggtctatcaatcacatacacttgccgtttttgctcttctgagaacttttctaattcccttaaaatcaatggaactttaggattacctaaggtttcagagtctaattgttcaaagaaaaaactactagccatttatttccctccttagtttattacacgattacacaatataatataattatattgttacttttttaacatattttcaccaatactacggaagattaatatacattcagaaaattcataatcgtttaaatactatactatactatactaatctaatgataaatcagacctcagataagtcaaagactttctgagctagtttttttaccataaggataattaattcgcttcaatcaggagatcttacaccttgttgttcataaaacttaccttctccaagaccaagacttgaaaaatggacttctcccgaaacttgattatcttctatatgaaatactgattcatgactgttaaatgagatgcattgtgtttttaagcttttcaaatctatacttctaatatactcttcgttccagtcgattctatcattaactacaaatctaatcttataattcaaaacatctgttcttatcaataaacacgaaagtctttcagagtgtacagtcagaaaaggactattctcttgttgttttatcaatctttcgaaaaaccgttttgatttttttgaaatattatatagaatccttgtctgagtaactatcagttgttctttttgatttttcctctctttgatcagatcaccagagtctaaggaggattctacagaattttctctcgcttgagaggttttatcatttatgtgagatgcatcttctttggatttttttttgcacaaacgtatcaattagactatcagttaactcaacggctgatggcatataataatgttcttgatctaaattaaattctaaccctactttgtttagggcactttctgcctgcttaattaatttaatacttttctcataatctgcaacccagtgcatcaataaactactgttaagaagtgaaatcgatttgtctttcatatttcaaaatatctccctggtttattaaaaaatgtattgtacttgccttttaaaattgcaggatttgctttgccacctttgggaataaacaaaaagtatcttatcaagttactcttcagattaactctggcgataactccaaaccctactccatcagagtaaaagttggaacactctttccaatagctcttcaattggtgtagcgcatttataggaaactttttactgtttcccagatgcgttttaacttccataggtagactatttgggaaaaacccaaacattgatataggtaaattccacaatgaacttagtaaatgtggtacagtctcaaatctataatccggacatttatttgttgatttgaatctttgaaaaggaattttatttatcggtacattacaacacgcagtcagagccggcatcgctattgcttctccgatattaccagatactaaaggagcctttttctttagtccaagcatgttaaaactaccaactggtctccctgtatatgtattttttattatttcaaaaccattactcgacccatttgtatataaattaaagtgtcttcctaaagaaagtagcatattttcaccatacaaagtaccaaattgatcgatttcccaatctgagaattcacatgttaaagtgtttcttaaatttttatcacttgcaagataaaattcacaagtaaatgtcgtcataattatacctcacccaaattgatcgaaattgcactttcgtgactgatactattcttcaaggcttgttaactaagcccttatgtaaaactcaagcatctatggtgtattatactgaattaagcaatattgccttatattttttcgaagaagaatagaacagttgagatacttttcgctatcactccggtacatttctttaaatttaacggaacacgacttgcttatagatcgtgttctagtattctttagacaggtcctatttcatattatactaaccgactaaaaatctatcataaatactcaactgcaaaaaagccgccaatatattgacgactttttttgctatattaaggtgtcttattcgttttcatcagataccctaattagtatacgttctattgccttctattcacagctaatgacacatacgtgaatttctagtgaatgtgagtcagcacaagagttaattagtatgagacatatatcttgttctctaaatgagtgtacactggttcaacctctgcacatcgaaatggttaacacataggttttgtatcaattattctgattgacaaaaggctaaaaagtgagactcccccagcaacatgtggttaattgcagggtaacttttgcatacattctctgggggcaaagtaatcaaaaaaattaagatattcattttacttttccgtttttgtataacgataacaccttgaggatgatttttaaaatctatcccatcacttgacactcccacccctaaaggggcaagatcactaaagtgattgggattcttagctaagcttaacgtcctcatttcatttctgctttggacagatgctaagattaggatatgccattacccctcctaagacagtgcatatagcaccttaggctgattgactgttaccgccaatcacagttgcgtagcgaatattcatcgccccaacgatatcacgatgtttcttgaatccacatgggcacgtatatcttctatcttgcgccttgttcttttttgaacatgctggacaggtttgacttgaatatgcagggttcacatattccactttgatccctgccatatttgctttgtattcaatgaattgtgccaaacggtagaatgaccaacggtgtagattcttttcgtttttacgacttgttcttgtcgtctgcctaatattcgttagttgctctaagcgaatgacagaagtcttattttcgactgcgaaattaacgatttcacgactgactttgtggtctttgtctttcatccatcgttgttctttatcatctaacttgcgaatagcgttcactttcttttgttttcctagcttttgccgaacactacgaaacttccgtttcttgtatttgttttctcgcccattcccaaagaagcgagcgtgatcatgatctgtgatggctacggcagggactttcagccctaaatcaacgcccaaaatccgcatacccgttttttcagttgttggcatggtgacagcaacttgggctatccacttacctgagcttttcgtgacacggagcgtaccaagtttatgcttcaaaaggtcaacgtttcgatggtctttgtcgatgaacaatgcacgaatttttaaacgcttagattttccctctaccatgaatggaatggaaatgtgcgtgaagtccagagaatagttttggttattccatacgcaaatcggtttctttaggatcggtatgattgcgtatttacttttcttaactttggtagagaagacactattcgcatctttaatcgcttgattttttactgcacttggtagattagcaggaatgtcttttgttgtcttcttcaaccttttcttttcttctaccatctcggccacgagtgtattaacaactcggatatattcatgactactttgttgcaatagttggatctgctctttagtcggcagcagctttaccttaaccgttagggtctgagacagttacttcacccccttgtcttttgttgttcaacataacgcttgatggtctcacttgatacatttccagcggtagaaacaaaataggaacgtgtccacaaactgggcaaatgcagaaggtgtggaaactcttctcgtagtttttttgatgtgactccttttattttggccatgatatcagcagggcttaatgttggaagtgcattgagaaacatatgtgtatggtctttgtcgcactccatggcaacaatcacaattttaagctctgcatatacctcatgcaccagttccttgaagcgctgttctacctctgatttgagaaatatctttcttctgtatcgtgggcagaacacaaaatgatagttcaacaaagttacggttgtgtttgtttttctatattcattcatatctatattgtatcagtttaatagatgaattgaaacaagctaaaaaattaagaaggcagacatttcggatacttgaagtatcacaatagtgatactccgtatccgacctcactttcatcccacatctaaagaattggactttctcgttcggggattctgtaatgaaggtcaaaaataagactagaggtcaggcatatcatgttcaaggttttcataatcatcccagaaaaatggcctttgatctcctacttttacaacgactttagtgtcatcgggattactggtgacgtcatccatccataaacccacgttaggatttccattcttccattcttgaagtaactctggatcaattacattctttacgctctcgtgattaagatcgatatcagagtcctctgtctgaaaaaacaacttgaagcgtagcttcaattcaggtgcaggatacaacatttctgatgaaagaataatagaagttgtggtgacgatcgaaacatatttcaaaatcttcaaagtttctatgactatcttttcaataactggatctacatcatgacgaagtaattcttttggtaactcaacgactagtaacatttgttgaggatcatccatttgacacgtcatgctccagaaagaccaagcagcagttagaaaggatagtgcctgttcataaacactccctgtagcttcaatgtaatatctttttccgtgatccttcaattgaacccaagggatctttccgatctttaacaggtgatccataagcaattctttatagatcacatcatcgctgagagactcaatagctctcttgtaaccttgtagtggtccctcaatatgcggtttaaaactaatgggtggcaatagttggcttcttgggacatctagtatctttgccaacaggttgaaataagagttcgaaaaaaagtgtctggtttcaataaatacacttcgatcctcgaagaattcaggtggatcgggatagccttccacccatggaatagactcaattgtatatgcctcgccaagctgaggagcctctgttgaaatcataaaaactgcctgaggatctcgcttgctaatttcattcgtgatatgggaaacaagctgcctacgtggtgagagtgttttatcgcctataattgctagttcagcttgattatattgccaccatgcccaagccatttctccatctccatagtagtaatttcccatgactaaaggtttttgaatgcttttattcataaatgcctcctacaataaaaaaacaccgccaatccataagggtatccttaggatgacggtgcttccgtttaattgtgtatttgattaacttcattataaatgatacaaaactgtttcacaatgcagacagatcttctaatgtgtaccgttaggagtatagtcatcatatgagctcttactcgcgtcgtagtacattacatctccatcctctagaaggaattgaactccatacggatcagtgatcttgtggtcacgcgaaccatctgtaccgtcataaccctccatgtcccaccattggttgttcaatggaccatgaatatattgaagatatggattattcaaatctgcatttcgaatggtctcaatgttgaagttgaccgtgatataaccgttttttaagaagatcggtgacttttcatctaatctattcttcttaccatacgttgctaaatcggttccagctggtacaacatatacagcagcaggcaaactatattcaccataccattgttgaaccgatgcatttactcgcgctggtgtggcgttagcattgcttgggcggtcaaatgtattaatgaaggtccgaagtggcgaaggcaggacctgaacatcatatcctccaacatacgtggcttctttagcacgttttagatatgaattcaaatactgatttcgcgtcactgaccagcctgtattcagatcataaacggatccggcagaattcacgatatctgcataaggtacatttcgaagtctagtgttaagtgtaatgttcctacgctctacatctgcactcgatccgatcttaacaaatttctgtttgtctgaatgataatacagatcaacaggtatccgtttagcggttgtactcgcattattatcctggaagtagaatgttggtgtgattcggatagcatccttatctccatacatatttcccttcgtcttcagatcaaacttgaaatggtaaccggtctttaccgcaacgcttttaaagttcgctaatggatgacttcctctccgaataggcaattgataaggagagaatgaaccgttcgatcccccatcaatccctttaatgccgacccaataggatgtcccttttgaagtactgctgccttttgctgtccggaatacagtttcccaattcgggtccgcaatatcagttactctgaaatcatacacacgtccaataacctgtacaggaactgtatttacagcaacatgattcacaaggttaaggttagccttgtcctcccatgtaaatccggtggctggtgaattttcagcaaaggatctataggacacagtataatttccttcttctacccataagggtaaatagaatgctttctcgatctgacttacagggacatcaatccatgtgttcgcaggatagaatgtagatttgtcagctgtatacacatcgaattcaaagagaacctgcttgagtttgatgtactttgcgtaatccctgttgccataaccaagtatgtttcggtgctgcccacttgtaggaagacttacagtgaatggacgatctaaaataaaggcacgacgtgacgcatcgggctttgtccgctgattgtgctctttgtcgtctgatgcattggaatagataactgttggagtatgtactgtaacagtgttgattccattgatcggtaacactttgtttgcaccaccgttgatgttgccaggcaacaagtcgtagtagatgtccccggaactagtggtatttagatcattaagcaatgttttactaatcatgttatttggcttatacagaacatctcgtccaatggttgttggattagggatgtttgatggagttggaccatctttagtagcttcagcatcgtccataaccttagtactgttaaaattcacaaggtcattgtttactttactttgtggcgtgtttgattcagccattccttttaaacgtccagtgtcatcaggtacatctggtggagaattcaatccccctgttaattttggtggtgtatacgaaattgcagctgttggtgctggtcgtacatgactttccactgcttcatcatttttagattctagcgtcggtgctgtgtagccagcaggtgtcatggttacctttttacctggaagagcgtaattctccatggttgctttagcaattttgtatacttcaagattgttgatcttccagtaagaatagtctcttgtaatctggaagttgtaaggtttaggtactgtatcccctgttttcaccggaggtcctggtgaacaagctcctctaggtggacaaacttctggaccaggtatagtccattctcttacataggatatcgttacgttacaatcatacgttgttttaccactcatttttgcccaagcttgtttgaacagatagttgtctgcgaatgcattagtgtaaagtgattcagatgtcgggatcccttttagcacatcgaatttctcagcgtccctattgtctgctttaattactccattcgcatttggatccagatcactcatgttcatcgtagttccctgggaaggtggtccgatgtttggggtgcaggatcctcctccgcccccagtttcatcatctcctccaccgccgggttcttcttctactccgacatttgttgtggttgttaactgaaagtcatccttctcccacaatactgttatagttgttgttcctttagctacagctgtcacgagtccagaagaccctacagtcgcaaccgaagggttggaagaggtccacgttgttgtaccattaccgctgttcacattagtcccagcaccaaagcttccatctccggttttggtttttacggttgcatttaactgttttcgatcattgatctggagctgaccaccgttggttagattaatttctttagtgatctcagcaaatgctttccagtatagatctgtgttgaactgataatctgcattccatttaggtggattatattgatccgtttctatgggtggaattgcgccaccaatttgcgtggtgaatttagtattacgaccagtaaacgattcaacagagactaaaattggttgtcctggttcgtaataagccgtattatccatatagtgaggctcattagatttatcgactatttccagagaatttctcttcacaccatttttgtcgaaatactcattgggaatatatacatctttgttcaagtcgagatcgacacaaattgttgaagatactggcagattctttgtactatcgttatctaattcgatgttgttacacttaccatcaactttccattttaagctatcaacctggtaaatatatacacctatattagtcttctttgttccttctacaggaattacttttttttgtgactttgcaggtgtagaaggctccatatgaaatgttttcaattctggtttagttcctgggcctccacctgcatcgatgtgagttgctgatgatacaaacaatacgagtgacagcatgaacaaaatcacttttttgatagatgatttttgccccaatcttatcccctctaatctgtggctatcacgctgtaggtaggaccttctttagacacgaggctcacatctgatagtatctctttgtcgaaatgtaaaagtcctctactccagtaaactggattcttaacagcgaatacacctctattttttgtgaagtcattaatcacgtgcccaccgtatgcagcaaatgcatctgaagttggagaattcataggattaattgttgctgaattaagtaagcttccagcctggagccggttcatgttgttatttttcacgttcaattcaagttctggaaaagagtaatatgctccccgtaggagtgtaaatccttcatccacgaaaacagggtaataaatacttctttcagtaccttttgcaaatgtattaacaataatccaattctttatcttaagatcagcatgttgtgtatctgtgatgatatttttattgcgcacttttgtgaagtcgtcagtaacttcgctgtattcaacgttgggtgagaccttgttctctggtgtttttttgtatttcggcgcaatgatattaatgtttgttccagtcaaaccaacttggcgaagttcattcaaacccttgtagttggaaggtttagtttttgctacagtggcataacgcgcaatcaatacagcaacctcggctcgagtggtcgtccgatctgctccaaacattttgtcattatagacactcattaaccctgttcccatggctacagctacagcatttttttgagatgtgataagagtaccagtaaagtattctttagcaggtatgaccgtgtttgttacgtcagacagagcttgtttgtagtccaaatctactgtagctaaaccagaagtcaaccaaattgccatttcaccacgtttgagagaggcttttgcatccagttttccttggtagcttgtagggttgataaagcctttttgtatagcagaggaaaccccaccttttgcccactcagggacatccgtgaaattattaattcctgggctagaagcattgggctgatctgagagtctaccaaggatgctagccatttcagccttagttacaggtgagcttggtttgaacgttccgtctgtgtaccctttaaaatagccttgttccacagctgaattgatagctgcagcggcccagtgtgtagaaggaacgtctttaaatttcaaggtagcttgagctgcctctaccgaactccctacacctcctacacctacaacgccacctgtcaataaagctaaggcagtaactcctgaaataatcatcttcttcattaatgttttcctccatcattaaattattttcaactgagtgatatatgaactcagcttctgttccttcaatcatattagaagtcaaaaaggaacgcgaatatagaacaatataattttatatcggaagaaatggatatctttattatattttagaatatttacaacactactcacccctttcaaatgcaaacaaaaaaagcacgcaaaatgcctgatggcattaagcgtgcttcgctttcggtgacctttgataaaagatcatattcgatttaattatacttaatataaacgttaatggtgcattttgtcaaccatatagactgggacctctgcaaaagtctgatattgtttgaattgggctatgatttcaatccacgcactcatatagagtgcaaccacaactcaaggtatgacagtggggcattgcatgtttcaatccacgcactcatatagagtgcgacgtgatacataccgtattttcgctatggcacatggttgtttcaatccacgcactcatatagagtgcgactgctaaaaatgacgtaatacaagtatatataagaaattaataacgtgcttctatgctattgtaatgaaaataatcatataattttaccaaaaggcaacaaataacatcgtttcgacaaaatctgaggtgcgagtcttccaggaaaatcatgtgtacttggcattcgcacctcaaatatagtttcgatagaaaaacctgatatcctttatcagtaataaattatcattttaaatagagccctgtcatagacccactgttaaaaaatgtaactacgagttaacgatcagggtcctaagtgagagactaaaatttatatatgtagtatatcttccgtatttaaatgaaatcctttcatcaaatcgactactcatcttctccacttagtctaaaccgaacttaaatttctactaataatctatttgctccctcgcgtacctttttgatttatatgagattgacaaatcctaatagaagcgaatcaaaaagcatacctaatggacaaacacattaagtatgcctcactataactaatttctattaccaacagtacagtcaagtggaatatacccattacttgcagcatccttttctgaagagaaaacctcttccgtagtgaatgaggaagtacatgaattcctggaataataatacttacggccattagctataatcccattataaataggctttttcacaacacggcttccacccaaagcgtaattattatagtatttttcgcccattggcatgccttgaacaaaagagagtactccgacatcattaatggtattgttccattcttcttgactgatgaggggcaaagtaaaggtataagctacaccgttgcgtttcgcaaagttattgtacatattaatatagtgttccaaatctttctgaatcggattgacaatagatgcccttctaacttgatcaaacgtacttgcgtcatttaatagtggtatagatgcagtacctgcaatctctccgcggaatccttcgaaccattgatggtccgtattacgatttaccgttacaaaatcatcaagtgtaaacccaaacgtgtttccgttctgatcagagtgagcatagggtttcttagggctccaaacatgcttaagttctttttccccagtagcattcgtaaattcgtccatatagtaaacgtagtaaccgtcataaccaacaataaggataacaggtacgtagctattgattacaccttgaccggccgaattatcaaaaacatcaaagttcaagtagagtgaattgaagaacgtttgcactgcctcttctttattgattctaagtcgtttttgaaactcatactgagattcagcgccttgtgaaccattgataataagggctttggctgcgtcctgggttgcagtatccatggcatggttataacgcgtctcaagaattacattctgccgattatgcgttacattgatattattaataatgaaataaggaagtaaaatgagaacgaacactagcgtgagattagttgtaatcttcattgaggaccattcctccataagggatgacaatcttttcattcggagtattgatggtcccagtaaggacatcgttaatgagggttcctgatgtacggttcgtgttcttaaccactacggagaaaaaatctcccgtcgctaacttataaacacgagtcggactttcagtattctcggtcgagttccttggaaaaagcttgtcattaatctgagcattataaaaggattcgtaattgacattaaatccacccaaataatcccctgcatcattatatattgggtcgtaacgcttatggcgatgttccatttggatgtcgtatgtatttgtggttagtgccatttgatcaacaaattcattatacatcgttggagtaatgtaacctttatctctaacagaatctacaaactgagtcacagaattcaagaccacaatttcagagatgtcatcctgcttatttaacccagatgaaatcggccataaaaagataagtacgagggccactacaaccataaagacttttaaaaagggattacccatcctctacatcctttctctaattaaatcttaataatatcaggtcgccctttgtatctcgaacgtatgtaggagtatagtttttatttacattaattcctgaaacattaacctccgttggatccaatgttttgtagtaagtaacaccatctactatgatatcaacgccgatgtctttaattttaaatatggattgtctaacttcggcaccagaaaccttataagaggtaggtattttcaaagttgaagtaatacttttgtcagactgggacgtcattttgtaagtcatatcattcgtatcggaaacagttttaaagaaaaacagaaatattgttagagcagtaatgaacataagtgctgcaacgctcatatacaaagcagatcttgtattctcacctaatcccataataatcacccttaattacttgaaaggggacgacttgagtaagtctatccccagtcagtgatttaattagttttgtgtaaaaatgataccgcgaataacgttactgttgtctttgatcagttgagctttgaattttccggacggattaacgtaatcattgtttgcttcatccatagctttagcaagagttcctgctggcgtacctgtaccaatcgaaccgtaaccctgaccacctactggcacagttgtgttcactgttttgaagtaccaagagccagttggatttttaccagtgattacttggataccgaattcacctttgtcttggaactttctaagtgcattgattgcttggctaccagaaaccgtggtcccatcatagacagtgtatgctgtttgagaaagctctgtttggatatctgcgaaacttgtttgtgcagttttggtggcgtcttgagcagaaataaacaaaattacagctgtagtgatcagtgcgattgccaggaaaagtcccgcagccatttttaaagcgctttgtgcattacccatttttaataatcccctttaaattataatttttgcataagttcgtaatacgtagacatctgtgtaaaagccataaagacaaatggaaacacgagatacaaaaagatgatcatgtacattggagtgaaaccgatcatgcgaccccagcctgcttttgcattgatcatttcctcgtaatcctgttttctttgttcgaaatagtaattacgttcagtttcaagatcatcaaaagcttgtttgactggaattttttctacagctaactgaagtttttcaatggttctcacgagtggagcaaatggcgcatcgatcatcagttgctcaagagcaagttcagcaccactctcatagttcataaggcacttatgtagtggagccttgaaaattgaagcgaatctttccatccattcaagaatgacctcaaccgatactcgatcgatttcactgagcatcgcaatgatggtatgaaattggtccacttcattttgcatatccattgctctcattctcttctggaagagaagtacccaatagggtaattgataacccacccaacccattaataaacatataaggatttcccaccacttcatgtattcggaattaatccgatccatttttgctaggatcctttctgttgaagcattgagtagagtatcgtttgttgcaacttcggggtcttgcttaatcatctgaactacacgatcctgcagattattgtctttcacctccttcatatgtttaatgatagtactatcaaaatcagtgatggattttgcctcacgcaactcctcttcggacattcgaccaaacatagaattgttttgcgtgggtgactccagcacatctttgattgcgatgtgatgcattaatacgaatgagaacaccaggccaatagaaagaatgatcgtcagaacaaaacgatgaaggtaatgccactccatgggataacccgcattagcatccttaatcaacttacttattttgaaatgctgtgctgttcttttggctggttcaagacggtctactatccatgaaacaatttttgatttcaaaagaagtttttcccaagaacgtttttttgttttcgctacataggtcccttcttgttgatcctgcattttttttaagaggatatatgataacaaaacagatgcaaatacaactattttcgttatgaatcctaacttgctagaatagaaagcctccatcgcaggaaattgctgacttgcccaaagttctattggttttgtgaagataataggtgtaactgcaatgacggtaagacctttgaacaagtaattcaatcgagttctctttagaatttcaaggttaacctcactggctaacttattgagattactgagatatagagatccatccttgattgttttatcaccgaattcttttattagaaaggacatgcctgcaaatgccttcaagaaacggtttggagcttgctcatagtatacggttaggctctcttctggatttacagagactaagacctcatgaatttttttagcgtgtagtgcagcttcatacgatgaagattctgatgcttgacgaagagcctcttctacactgccatgctgatgatagtgatgtcgtacatctttgaagagttgatctcgtaattgaattaacaatcgatcatccactttatgtacaaaggtatcgattaacatgccattcactacgatagctgcaaggaacagcatgaagatgaatgtgaaatcatgattcattaataacaaaactagaacgacagcagcaattgttccaagtgtgtaaaaaacaattctcatggtttctcttcgcattgtgaattcatcatacgaatggatggcttgcaatctctttcgaatcttttggatataatttcgcaagaatggtactttattgtacgcgatgtacgaatcttgcataaatcgatgaatcatctgtttacgatttgatttcttattcccggtgagcatctcatagctcttataatgttcctgggaaccatcgcgctcggatcttcttgaaatgatcttcattacgatatagagtacgatgcttaggaccactgaggttaaaagaatactgactgcaatagccttcaaatccatccttcttacccccagttttcctgcataaattgtttaaagcctgcttgatcaacttccgtaagattttcaagcatttctttgacattgtgatcagagattggatgaactgcaacataaccaccatcacgatattcaataatatttcgttcatcgaatactttccgatttgtagatctcttcatatacttaatgaatgtttccatgaatgtaatttttctctcttctgaatcactcatagtccggatatcgaatggaatatcttcatcatcatgaagtggtgtacattctgtgattctctcaataaatcgatgtccgttacgcttacgaactaaatgaatatcgaaatttaggacattcacaacttgttcttcagctattttctcatcactgaaaacattcattttgagcaatgaatttcggaggtaatgaacgagctttttaaatgttctcgcatggtgtgtaaaaaacatatctgcttgctgcgccatttgaatcatataaggtaccgcagcatctgttgctacttctcccaaaataaatgctgttccgtctgttttcttttgaatatccaaaccttgttgtcctgtaatagagtcggtttctctaaaagtgaggatatttcgattgccgaaaatcttcctcaaatgcagctcaaatgccatctcgtggacacgaattgcatgagttttatacatttcaagaaccatagccataagtaacgttgttttaccagaaccttgtgacccggttacagctgttacacgccctcccctaactagatacctgatgagaagaataactaacatccgatttttttcttcttggctgatgagttgctcgagtgatgctttttgtgtatcaaacttacgattgaaaaatgcccaagactcagagaaaccaggacggacaacaacgatccgtgaaccgtctttcatttcatttactttgtaaccattcgattctgagagttgtcctggattattgtaacgatagatattttggcagacacgtttaagttcagcttcagatccgaaactcaaaaacgacatatggatcggtttacctttatacaaaatccaaacactgtcatgactatagggtgtgggtttcttattaacacgatccgcaaagaaagccatatcatcgaaaggttcaatctgatcaatgggtacaccagaaaccccacccgacacgccatcaatcttcatgtctcttatttcatcaattactgagaaacctttatattgctgatagattctttggacaataatcatgagcttatcctcaaaagaaagtcccttggattccttacgataaacctcttcaatttcttgaggtgtaataacgtaatattcgtcttctacttcttcttcaggattcttcagctcatctaacttgtatctatcaatgatctgacctaaagcatttaccccatgtttttgtttgttttgaaacaacataatttcaaacttatcttgtagggagagagttttcttattatcaaacggaataatacgattgatattttcatcatttaagtcatatgttttcaagagaagatcaaaaatcgtatttttgacatagtttttatcacgaatatctccatctgtgcatccctttaatgatttttgcaacatcaaacgctgattcatccgtcgatcaaattcttcttcagttaaccccaaatgctccatgttacttgttgtcagatcattaatggctgtttttacatattcggtaattccagctaaagtgtacttctgatctatctcacgagggtcgcgtttgggttgacgtttttcagtcattttaaaatagacgtaaacaccaacaagaaatagcattactagaattaatccaagattcacaagatgactaatactcataccttaagccccctgctcactatatatctttgtatcaactccagcggcttcaaatatccctttagccagttttctaacttcactcagaaagaagtgattttcatgttggattccgatatttttatttcgaaagaaaaattgaactactgacttatcattgagagcatccatgtaacctgtgcagtgaggaatggtatatataggtgcttttggtttatacattcgtttaatgttggaaacagagtatttggaatgacgatcatattgaccaagaacaattacaacttttttctctttgaggaactctggttcatcagtgaagaactcatctaagaccgctttattttggttgagattaactacgattacatcagaggtcgtcaggaccgaattcgttaacttgtttcgcatcccactactcacatcaatcagagtgagattatagtaattctttgccgcatcgaaaatacttccgattacttcatgaatcatggagaacatttcttcattaggtttcactgttccacgcagtagttctaaacgatcccgcagaacggtgtcggtgtagtcttttacgatctttggagccaagcgattactgcgagctagtctctctaaggcgtcaatgcctaagctcgaatactctgaactatcaagatccttctcgttcagaaaagtagattccaaagatgacatactccaatgtgtgtgactcacaagcgttttcgttaaatactccatcccaatgagtgtggccacagcaatcaaattggatgagtttccagactgaccatgacggttactccaaaatgctacttgccccatgcaaaggacctcctcgtaagttctttcatagaactttttattaaattcgtttcaagttccgaaatttccgccgttaatttcttaataatccctttatagttctttgagagacgtcgaatgtttatttttccttggtgttggttatttatttttgttacataatcaatttcatcatgtagtaattcaaatggctcttcagaccaactgatagggaggtctgtcagaattgtctcgaggtaatcctcggcaatattgccttctacatgattaaccgagattttagtaacatctgtttttggacttttaccgtcagaatgttcttttccgaataaaacctttactaaatcaactgttttatctatgctcattttttctggcgtagcggcaatatatttggtatgaaacgaattgaactcctctttgttcaaaaatgaaatatcactgcagtgaacaatgagttgctcataatcattttttgcaattaaggtttcgatttcatcaaaagtttcgtagccaactgctacgtcaaacccatcaaactctactactttcatttgcgatgtcgtcattggtgttggtgtgttgttctgtatgtacttttctgttgtgccatcaactaaaagtactttcctcccagaaattgaaatgactttacctacatattgaagtaaatcacttatatctgctgatccaagaaataatgatcttttcatgctgcccctccgttctatttcactaatggctgcccaaaaacgtctttctgtttttcttcgcttgtagaagtatccagtccggactctatcggctgaacaatttcctctttacttgcttccgtagattgagttgttggagatggatctattgaactacctggtgatgtacttggttctgcacttgtatcgggtataggagccccctgtgttccggttactgcttcgttattttgctgattcgtaatttggttgttagcaacctcttgttgtaagatcacacttccattttggattttcattttgtctgcttcatccatttgagagagattgttttctagtacttgtcttacatttctttttaattgctcttttgcgaatgtcagaacattcggatcggattgaataaggtcaattactttcaggttagctggatagtttggaattgctttttcttgcatatatggatcagcataagtaacggcataaagtttggcaccgttaaggtatgcatcaacgatcgcactagtcattactaacaattcagcttcattaattttgtaccaaacagttgtgccggaaagatcttcaacttttttctttgatagaacgataaaatcttcacctgtcgggaaggttaaccgtacgtctacaaattggccttttttcagtttagttggaagtaacatcacattgtactcttgtatccgttgatcacgaggggttggaccgttatcaaacaccattgaattgattacgggtgtattctcacctacatcaattttaacgatctttccatatagatcatcgggtgtctgtaccatgttagtgggagcatctgtttcaggaatttgaatgactttcaaattttccttcttaagcttgtccccttcttttagtggtttggatgctactacgactgttttcatagttgattgttggtgctggagtaatgcctctgcttcaacgagttgagactcataatgcatccttaacactttttgctctttagcttgctgcttaatgaggtagatggcgccaccagttgataaaactcccatagatagagcccctacaacaccagctataatcaaattttttgtacgctgccttactttggacaattacatacaccccttatcttgaaataaagaaaattaacaaaaacataagtataattgttgctagtaaaagaatggatctctttatcattttcttcttctttgtaaagcctcgatcaaacactagatcaaattgttcattcgtatcatcctgagagtcaaaaggatcagagtgaaaagggatttctaatgcatggattccctcattatctttttcgatatcggcaatgctttgtttgctgacaagagggaccataaagatgcatctttcgagatcaacatgattggatgacagaaatcttttgatgttgtgctgtttccactcactacctgatgcaactacaacttgggtacttgcccggtgaaattcagatatgtgttcagtggtttcataagtccccatatctagaacaatatgtgtatgttctgaattcagatggtcagccatttcaaattcatctgctgattttacgtaagttacgccttcaattatgaattcatcattaagacgggtgtctacgtttttaccttcgtaggctttttcgatataaacaagttcgttatttccgctcagttctaataacttaactgaatatccatgacttgccagataatttgctatcaatatagaagagtgggttgttcctacgcctttttcgataccgactaccgagatgactgatttaccgacaattcggtctctgactacgatcttctgcttcagatcaggtagcgtccaaaaatctgattcttctaattcttcttccatgatgtcgggtaagattgttttgtttgtttgcttgttactcttcaccagatgttcttcatcttcatccatttctttagaagaagaatttatttcatttgatgtattggtactaacctcaccttccttcacattttgtttatcctgtcgtctgtgggccttatctttgttatgtccctcaatattaatggttatagattgagcaccatttacaaatcttctccacggtattccttgatcataattccgatactttttaacttcactataaggtaaagggtggtctatacatttaattaactgtttaatattcaagggttcagatttttgtgattttaaaaatatattgtaaatccccatggatactagttcagcaagtaaaggatgaccttgcttttcatccgataaaaaaattatcgagcttttactgaaatcttctcgaattctatcgattacatctgcgaggaactcgtgccttttatcagattgctttacagcgagagagcttgagataatgactgcatctaaagtggttgaagggtcttctttgattagatgaagcctctccacaagatgatcaactacaacgcacacttctaatacatgaatgttttcattttcaaaatgtttttttaaagcctctgcaaaagcaggattaggaatggcaataataatttttttcttattgagttgctcaaaatcaggtgccattcattgcatctcccctttgttgactccaaataatagttccaagaaccttctctatcttctttatctcgtcaggtgtgggtagcttaagtccattttccaatctactgactctcacttgaaatgatcctatgtagtttgcaagatctttttgagtcatatcttgtcttgttctatggatacgcatcagttccccaggtgtataatccaatcactgtcacccctttccttcagggtaagaaaacaaaaaaaagcacgcttaatgcctaaggcatcaagcgtgcttcgctttttgtgaggacccgtccggatcatatttggtttatttatacacaatatagattattaactggtttgtgtcaacaactttgatttcaattttttcactgtaccctctttactcaagtaaatcgtagtactagttaagttgtataatcttcatgctgtgtaatatttgtatagttaaaaatatattatgtaatataaaactgaatactatattgttcatttaacacttaagtattcagttttgtgtgtattacacttgactctttctccactatccaccaaaatagagtataagtatatttataccgaactggaggatatcatgggtatcacagtatctataggagtacaaaaaggcggagtgggtaaaagctctactacatgcattacaagttatcttttagctgaaagaggatttaaagttttaactgttgattttgattcgcagggtaacactacacaaatattatcaggaaaagacatttactcttttgaagataatacagtactaaacgcaattattgatttggatcctgctaagtacattgttaaggtgaatgagaacctggatttattgccggccgacgacatcctatcgacattaggtagagctttaggaaatgtaaacagagttgttcctacctctctaaaagaaacattggatatcataaaagaccagtatgattttatccttattgaccagccacctaacttaggcgatctttcagtatctgcattatctgctagcgactatgtggtagttatgctgcaatcggaacctttatgttttaaagctatcccaaggtaccttcaattggtggaacttattaaagaaagaattacgcctacattaaagttagctggcattctaccaagtatgtcggattccagaactcgaattgactcttcaattattgatcaagctagggaagattatgaggactgggtatttgacactgtaattaaaagacgtaatcgaattaaagagtattctattcttggtatccaaaacacaacaaaagaggaccgagatgctcttgagcaatatcaacaatttttagaggagttgctaaaccgtgtccaaaaaggatcagtttaaaaaattgttgggtgacagtggtactaccggatcagatcaaaaaaatcgtatattgaatgatactcttataagcggtaataattctttgcgacctgtttctgatgagaataaacattcaagtgttgattcggatatatctacaattaatccagcagaggaacaaccaaaacaagaacaagtaacacaacaagaaccacaacaagaaccactaccagtagcacaacctttagtagagcaataccaacaaccagtacaacaagatcctgctaaagagttaattcaacaagaaattcaagagacgaaacagagcaatgagcaagcacctgttagttctcatccacaagtttcagctgttaacgggatatcaagtattatttcatctttatcaaacacagttgatttaaaagtagaagaaacacatacgcgtaaaacgtatctaatcgaaaatgaattgttggctgaattagataagttatgtgtaggtaagaaaaaaggctacaaaacgaaaatgattaactcaggtctaagaattgtgctagagttagtgaatgaaaataaggaattcaaattataaacttactgaatttcaaaataagaaagaggtacaaagagcaaataagctcttcgtacctctttcttattttatgctacaaacaacttaaaccgtttagtgatttgagtgagaacctatttacggttttgaattttattccatacatttgtaggtttagtatcatccgagttgcttccaaatctgttattaggctctgaaatttcttcagtagttgaagcaacttcttcttcaatttgattttcttgctttcgattgaatacagatcccccaaagcctccagaagcgccaccaccaaatttgttggctcctcgtttttgatatggattaaaagtggattgttttacagattccattacacctgagatattcagttcgatatctttgttttttacctgtttttgtttttctaacatttcatcatattctatagtcatttcaacgactcggcttggtaaagtcatcccactaaaaatagtatagacaaccgcgtattcatcaaaccagataggatctccatattttccttgagctgtatcattaaactctgatattacttgtttaatagtctgttctgttttgacatctttgaatattgatgcacttgatggtctaagtacaaaaccaccatacattgttgcagtttcataatcatgaccacaagaaaagtagcccagctgaatactatttctcattttactattcaatgtattactttcgtaaggggcttcaatgctagctttgtgaatactcaagaaaccacctgacagttgtacgattttaataaagtccgagggatcataagtactattgtctgatccaaagttagcagggatcaagttagcctcatggatagtacttataatcgcatcgttcccttcatctttccaagaaatcaaagtactactgttcagtctattctcttttttggttgtaaagtcgttaaatagtttcttgttatcagtaagaattacactaccaagtggtttttcttgacctggactaaatagctcattttgaagttcaataaattctttgatttctgcgaggagaagaattgcattagacatttcagtgaaatcatcaaatggacttgagagcaaaagagttatagggaccggaaaaaactgttcttttattaaacttaacactagtgaaataaagcctgtaccaaagcccccaccagctccagcgcaaataaacaaatgatcaacatccatgaattttctttccattgcttcaatcaattgattacgcatcttgtctgcatttgggttcaattgtggatcgaaattctcaacaacaagagaaggtgttcgggcagcacctctaaaatcttcaaaatgtatgcgatcttcgaccggaatgttcttaagatgaagcatgtcatttttagaaaaattcacggcaaggctaggatatatttgttttccatttgcatatgtataacctgcaaaaatatctgcatctttgttacctttctgccctgctccaattacaccaaatcttagagagacgtcattgattagtgcattttcgttcatgaatgtaagtactttactattagatagacccattagaattttcctcctcatattgttttgctacatattctgtgaatgctttaccgtcatcagaaagaaagaacttatgttgccttttgctgtactcgaatgatattaaaccagcgaacaaaagagcatctattgcggcaacaactggatttttagaataatcctcactcatcatagagatgatgtcttttttagggatgagattgttgtctgtaataatgctcaataccgatatgtgagcctcacttaatttatcaagaaatgctcgataatgcacctctgtataaagtttttctgacatgctcagtcttcacctccctttgattataaggtcaccttaaggtcacctctaggttaccttaagtatatctctttaatattaatttagcaaatatatctaaatctaattttaagaatgctatcttatctaatcttatctaatatgaattctgtaatactctatcagttataacgatttctcgtgtgagacatttttattaaagctgttaatttagagtgaccctagggtgactctattttacttaaatatagtcatattatctttatttacattaggtgagagtatagacgcttttctactcttcttaatggtctgttggagagtatccacaatagtagtgtgatttctctcatttattttataatatttcgtttctaaaaaataatacactcaaacaatattatgacgattttaatgactacaccaatgattgattcagtgataactttggtgactgagtcacttttattatcactgaacttatcacgatgtctgtcattgcgtatatcgaccacaaaaggtcgacaaattcgttgtcacataaggtttttttctgttaatctcgacatactgctttaattgacaagaacttagggttcataaaggttagtaaatatgtatcaaattcaagcaaatttataaaggagttgtcatcaaattggatgttcgaacaatacataaactttctccaaccaagtgtaagataattgaacgtctctttatttatagaagtcttaccccatatcaagtattttttcttttggatccggataatattcctttaacctatcctcatttctcatgggaactacttaacttatcaaaaatgagaagcacatggaatcagttggctcaaatgcagaagaccggtattattcaggtggcagctaagcttagtaatgatacgaaggttttaactttatcagaagaaggattatctatagcttacagccttttagatatccctgagattgaaggttaccgaaatacaggttggaataatcaacacggttattttccatatgaactttatcgcgctccaaaagagagactgcaaaaacatcataatttgggtattgatttcaatgttttaatggaactcttatctttaaaacataatttcacatatgattttattgataatagatacgcctcagtagagttctcctctgtggatgagaatactaaaatcgaaactaagaaaattttcaggcccgatggagagtttattattcgacctaatggtactgataaggaatttcactgttgggttgagtttgatatgggaacggagaaaggcaaacttttatatgagaagttttctaagtacaatcaatatctgtcctatataagccaaggggttgagcgagattctttagccacttctatacctagtactattttttttgtaacgactgcacgtcaaagtatttggtctcgatggcagaatattcagcggaattatttgaacaccattgaaaactggagcacatttataaatttgtatgtaggaaatattgaatcacttgaaagtttagtgctgtcctttataaatgaaggagacttgtttaaaaataaactgaatttaaacttaagaccgctccttaatgatcaagcttatattggacaaccaaagccctccaaaaatctcacgaatgcctcctccctttcaagtttttgttatctatatggtaacgaaatgaagatattaggttgggagccgtattttacagtaactcgccttaaaagcaatgaacatcaggtttttctttatgttaagttcgacgaatatgaaactggtggtatttgtaaggcaatagatttcgcttcaaaattcgaaactattgaatccatgaaaaggattaatgcaattgaggttatccctgtgttactttactcggataaaaagccacattctcttgattttattggttgtgatcagaaggttaaattcgattctatctttaagaagtatctttggcataatgtttctgagaataagtggttcgataaaaacgggaatcatattcaaacccaccccttaaatttatttcttgttgattaagtttttgtgtattaaagataaatatagtccagctgcgtcatgattaaatcttcaagttcatataccgaacatatttcaaagtatacccatcctttaagtacagtgctgatttaccttaagtacttttatgatgtttcacttacgaaccattcaaaaatgatctagattatgtcaatcaaacaattttcaaaacataatactttaatgaatatattacgtaatataaatatttaattttaaatattcagtattctgaatatattatgtaatagttaatttagtattgtcattagatcgctactagtcatttaatggatacccaagcttttagtgcctttgaaaaccccacagtttaatccatcataaactgtggggcttgccatataatcagcaatttcaagtaacagtaaactgaatacttatattaagttagaactcagcatgtttatcacaaatacgttataggtaccattgagctagtaataatataaatctctgcctcaagtatcttaagtatattcagatgtaggaatctgaatataaaactgaatatatttatattatttaagttggattttatccgtatcctgcttttttgtgatagaagactcggtgtagtgtcgtaagtatatattgcaacgtatgagtactcattgatgatatataatcatctaatgaattgtagtgtttcatttcaaatgtaatactaactgaatacttaaatattgcgtaatatacaaggtaatagatgatgtaatttataattttaaagaaatgctgatctttactgatacaatgattcttcacagtaaatatttaatacattactgaatatattatgtaatttaattgtattcttataagactcctaaaaatccgactaaaggatatatactctcggtggctgttcgaattctcttatacaattttatcgtatactaaaaatacatgttctgccgtaactaaacccccatggtttaatctaccataggcggtgaggatgactatataatcaataacactgaattaagtcgtatatagtaaggaagactgcagattgtatgttactactatgctatttatccccgcagagaagttaatcgggtaaatttctgctttaagtatatggttaatattcatatgtggtttcctgaatataaaactgaatatattcatattatttgaacatcaaatacatatccctctttaacgtatggtaatcaagacttatttggttttaggcattcagtacttaatgatttgttgtaaaagtattcagtaaactcaatattcacatgaatatattcaagttcagtaatctgattatcagtatatacgaccagcataaatacttatagatgacttataatcatcccttgaatttgtagtgctacattttcaatgttgtgtaatctaaatacttaactgttaagtcatatacaacgtaatatatgatttaacttcaaagagtctttaatctatcttacacaatgacttctcataggattttataatacttaacttaatatattatgtaatattaacagtaagtggccaaattatacctataggccacaaaaaaagaaatgtatacttactacttggcattttgaattcacttgtactgcataacggtaaacttaacatacatagagtatggcgactaaaactcctttggcttcattcacataaacgatgaggttgacggtataatcattccaagtaacatgaaaccgaatacgtttgtaacaagcaagagattagttgattcatacaattatgcagtttttacccgcagagagttaattgagctaacatatatgtctatacagtataagttcaagtttagaaacctgaatatataactgaatatattcatattatttgaacatcaaatacatattctttaacgcatggaaatcaagacttatttggttttaggctttcagtacttaatgatttgttgtaaaagtattgagtaaactgcagtatatacgagccaatataaatacttatggatgaataataatcattcattgcattgtagtgctagatttccaatgtaacaaaaatgaatacttaaatattacgttatatattacgtaatagatgatgtaacttcaaagagtcactaatctatctgatacaatgtctcttcttagtgactgtttaatatgtaactgaatatattatgtaatattaatagtaagtatttaacacaaaatagaagtatgcacttctatggccattagaatcctcctgtgcagcgtaatgaagcacttaacatacataaagtgtggtaactaaaaacttactgtttatgcataaactcaggaatgacgagataatcatcagttccaagtaacagtaaactgattacgtttgtgataagcaaaagagtagctgcttcatacaattatactgttgccacccacagagagttattcgtattaacttttatctctattacgatgtatattcacgtttagaagcctgaatatataactgaatatattcatattaattgaatatcaaatacatttcttctttaacgtgtagaaatcgagacataattactttcaatactaaatgaattgttgtaaaagtattcagtaaactcaatattcacatgaatatattcaagttcagtaatctgattatgcagtaaatacgagtcagcttaaatcttattgatgacttttaatcatacattgcattgtagtgctagatttcaatgtagcaaaactgaatacttaactattacgtaatatacaacgtaataaatgatgtaactttaatgagttactaatcaaactaatacaacgactcttcatagtaactgtttaatactaaactgaatatattatgtaacactaatagtaaatatttaaataagacttacaagccactaaatagaagtattcactactatggccattagaattctcctgtacagcataacgaaacacttaacatacataaagtgtggtaactaaaaccttactgtttaagcataaactcaggaatgacgagataatcatcagttccaaataaaagtaaactgattacgtttgtgataagtaagagattagtagattcatataattatggagtttgtacccgtagagaattaattgagttaacaaatatgtctatacagtatatattcatgtttagaaacctgaatatataactgaatatattcatattgattgaagatcaaatatatattcttctttaacgtatggaagacaggacttatttggttttaggctttcagtatttaatgatttgttgtaaattgttcaccaaactgaatattcacatgaatatattcaagttcagtaatcttaatatacagtatatacgaccagcataaatacttttagatgacttataatcatcccttgaattgtagtgctacattttcaatgttatgtaatctaaatacttaacttttaagtaatataaaacgtaatatatgatttaactttaaagagtctctaatctatcttacataatgacttttcatagtgattgtttaatacttaacttaatatattatgtaatattaacagtaagtggccaaattatacctacacaccacaaaaaaagaaatatgtacttactactaggcattttgaattcacctgtactgcataacggtaaacttaacatacatagagtatggtgactaaaactccattggcttcattcacataaacgaagaggttgacggtataatcattccaagtaacataaaatcgaatacgtttgtaacaagcaagtgattagttgattcatacaattatgcagtttttacccgcagagagttaattgagcaaacatatatgtctatacagtatatattcatgtttagaaacctgaatatataactgaatatattcatattaattgaagatcaaatatatattctttttttacgtatggaaatcaggacttatttggttttaggcattcagtacttaatgatttgttgtaaaagtattagtaaactcaatattcacatgaatatattcatgttcagtaatttgattatgcagtatatacgagccagcataaatcttatggatgacttataatcatctattgaattgtagttctatgatttccaatgtagcaaaactgaatatttaactgttacgtaatatacaacgtaataaatgatgtaactttactgcgaaactaatctacctaatacaaccactctttatagagaatgtttaacactaaactgaaacgtctgtaataagcaagagattagctgcttcatacaattatgtttttagtacccgcagaaagttctcatgttaacggcttttcgaataccgtgaatattcagatttaaataactgaatatattactgaacatattcaagcttagtaatttgaataatcatatacactggccagtacaaatatttatggatgtcgtatagttctacatttccaatgtagcgtcagctgaacaagtatctattccatcatatacaatgtaatagatactgtaacttcaaagagtcactaatctaactgatacaatgtctctttttagttactgtttaatatgtaactgaatatattatgtaatattaatagtaagtatttaacacaaaatagaagtattcacttctatggccattagaattctcatgtgaagcgtaacgaagcacttaacatacataaagtgtggtaactaaaacctttctgtttaagcataaactcagggatgacgagataatcatcagttccaagtaacagtaaactgaatacgtttgtgataagcaaaagagtagctgcttcatacaattatgctgttcccacccacagagagttattcctgttaacgtttatctctattacgatgtatattcacgtttagaatcctgaatatataactgaatatattcatattaattgaatctcaaatacacatcttctttaacgtatagaaatcaagacataattactttcagtacttaatgatttgttttaaaagtattcagtaaactcaatattcacatgaatatattcaagttcagtaatcagattatgcagtaaatacgagtcaacataaatcttaaggatgacttttaataattcattgcattttagtgatagatttccaatgcagcaaaactgattatttaactattacgtaatatacaacgtaataaatgatgtaactttaatgagctacttctcaaactgatactacgactcttcatagtaatactaaactgaatatattatgtaacactaataataaatattcaaataagacctacatgccacgaaatagaactatgcacttctatagccattagaattctcatgtacagcgtaacggaaacacttaacatatataaagtgtggtatctaaaatcttactgtttaagcataaactcaggaatggaatgccgagataatcatcagttccaaataaaagtaaactgattacgtttgtgataagcaaaagagtaactgctacatacaattatgctgttgccacccacagagagttatcgtgttaacgtttatctctattacgatgtatattcacgtttagaagcctgaatatataactgaatatattcagattaattgaatatcaaatacataacttctttaacgtatagaaatcaagtcataattacttttagtacttaatgatttgttgtaaaagtattcagtaaactcaatattctcatgaatatattcaagttcagtaatctgattatgcagtatatacgagctagcataaatacactgatggatgacttataatcattcattgcattgaaatactagatttcgaatgtagcaaaactgaatacttaaatattacgtaatatacaacgtaataaatgatgtaactttaatgagctactaatcaaactgatacaacgactctacatagtgactatttagtactaaactgaatatattatgtaatactaatagtaggtatcaaataagatctacaagccacgaaatagaagtatgcacttctacggccattcaggaaatacgagataatcaccagttccaagtgaaagtaaactgattacgttcgtgaagcagagagttaatcgtgttagcatatttttattacgatgtatttttacgtttatagaactgaatatataactgaatatattcaaattaattaaacaacaaatacatatctttattaccgcatagaaatctagacataattgcttttagtacttaatgatttgttgtaaaagtattcagtaaactcaatattcttataaatatattcaagttcagtaatttgattatgcagtatatacgagccagcacgtatagatgacttatagtcattcattgtattgtagtgttagatttctagtgtgagaaactgaatacttatgtattacgtaatagacaacgtaacagtttgtgtaatttcaatgagaatgaaaccttatagattaaatgattcttcattattgattgttcaatacgttactgaatatattatgttgttaaactatcattttgtattctcctgagatgacttcatgccatccattggatatgtattctctcggtagtctattaaatacgcctgttgtaaactgaacacgcataaagtgtggtataaaactgctcagcttagttcaccattaactgaggggctgactgtataatcaatagttcgaagtaatattaaactgaatacgtttatatcaagtaagaatgtaacttgttcacacagttaagttgttgagaccaacagaatagttaaacgagttaacactacttctaggatatgtatgtattgacgggtgaaaatcagacacatgttacattaatacagcgtattacttaattcactaaatattatgtctgagtttcagagatgttcagtaaactaaatactttattgaactatattatgttcagttcatatgaggtttatacttcgaactaaaagctccctactaatagtattagcacattaaggatttgctatacacgatcttttgtatttcataaaattattcagttgtttcagtagtattaaagtattagaactcaaattttcgagaaatatgaacatttacccgttacaattgagttgaagattaagagtaggaattaaacaaataaccgaatcgataatgtaattcgggtgcacttaaatctactacctacgagtttgggcaatctcaaggtgagattatgaatcctatacaataactacgaaaaactcagtagtatcaagggtttagcttgtccattttttgaaaaggggaagaataaactataagaatggtatagatttaaacatgaatgaatgttataaaatacgataacgtatcaattcttcacttaataattatcagttaataataaactctttattccgagtttcgatcgttagtaaatccagtgctatcaaggatttgagagctacttcagatcaagaagggaaagaataaaacagaaaaatcggtaaataattatatgataggatctccagatatacgataacgtatcatttcgttatgtatgacagttcattatctgtttattctatgtatcacgtaagtagcatattcagagtataaatgatcaatgaaatgaaatatctgttaccaccttaaatatacatagctattcatcataaaagtatcgatacattgaagaaaatgcttttagtcttcagggaaatttaaacagtttgaactccgattacttatacaacggtcaaaaatggagaaggcgttgggaagcggtaccgatcgaatgaatttctcgtagccatcagttaagagtttaggctcgtactaacatcctcaatcttcatgaaatgaatttatgcacacctctatatgaatgtctaaagtatttctgtatctattcccacagaatgaacaaatttcgcttgttggacccattgccccaattaaacaagttgtttcccataccattttattttctcaacagtcatcacgagtagacctctcttatgtatgatttttaaccagcattatgatatttagtgtctctatctattcttatacgtttttattgctctgtcttgaaggtggtgcaatttcgtcggcagaatgccgtgtgatgttttttgctgattggttgaagtattattgataattttccgtactttcctatttgagttcagtaagtttgcattgtgtaacaaatttctccttactaaattccttacttttctcttgtacatgaacaacagtcaaaatcaataagagctggacatttcttagttgtgcgattaatagaagtattaagtttaaataatatgttaatattactgaacaataatacttactattttaagctgtagacgatattctttaagtattaagttttatgttcagtaatatattattattcattaaccataagatgaatttattcttgctccgggaaaataataatgcatttaaatgtttagcattcgcttccttatctcataaagataatttaatgaacccgattaatatacgggaatttgaactcgataaaatagtacataattgaacaattaaatattacataatatattcagtaatataagtattctatttaacctttcataagcagaataagcagaacccatttttgggggaagggtgttgggagtaagattctgttcatctcttcacttagaaatgaatagttatatctattaattatttgaccttcctgattcaagaccttttccaacatccagtgttgagaaacacattaaataatgttatctttatgagaatcaaataatccatatgcgaagtacgcatctacccaatcttgggcaaggtgcgtttttttgtgtttaaccattcactagtttctaactcagtttagggcttaaggagttgaattcatggacccgatattacgaggcccacaagaggttcgagatcaagcagagcaagacatcgaatccatctctagtcagtcaataatagcaatacaagatacgatgtattatttacgtgcagaaaagcttatcccaggtattcatatatccattaggattaaaatagactcttatgatttaggattttggaaccgaatgattttagatcgagtgaattgtgctaaagaatggttgaggtctactgataattacgatagccaagagtctgatttaagcatattctcaactatttataaggaattaacaattcacaaaactaatagtacctctaatgatctgtatcttagtatgtcactctatataatccattcagttatcgctgcgttagaaatagaatctcatgtgatgatgtacgatggaaacaaaaaggggcatcaaactgctcagaaatattctcaattaattgctgaagctgtagaaccttatcagttggtaatgaataaaattgatcaggttttgtatgggaaaattcaagagaggtaataacatctgaaggaaaaaacggaggaaataaatgaatcttactaatgtatgggggagagaagaaaatactcttcacatgccatggagatcatagaagaaatccatgttctaatgggttagaaatgttaagtacaagaggtattggcgaagaaggaaatatagggagttgaggcctggttctgcttgacttgagagtctacttcatttcttaagaatatctattttgtacaattgagaaacaccattcaggtctctcaattgtactgagttatgtgacggctatttctatagttatatatggacatgcagaatcacagatgtaagtcactttagcagagtttcaagtaatgtcagataatcggtttatttagctggatattaacgttcttaatttggaaagggatttataacaattcagttattgactgaggtagtttatagcctcctgtaagtttcttacccctaccagtttaatattttctaaattgtagctagtttttgctttggcaacctcttgttcttgatatttaggatagataaaaatatctactttttcattctttgcagtcagcaatttgagatccaggttacttattgactgaatatcaccacccctagttatgcctcctgtgccagcaatctttcttcctctagccaaatcgacattcggatcgagttgctgtattaaacccaatgccaacatgaaaccccctgactcgcctgaatagttgttgtccaaatggataacgtcatcaacagataaccctttaaagacaaatttgttttttaaataaactcctaacgttgcttttccttggcgatccagttcctttatagtcactggaatctctacgttgctagtatcacgatgaacgattacgtttacggtatctccgattttaaaactctccagataaaaattaatatcttctggcgagtcaacttctatatcatctatgaacagaacttcatctccaatcttaagatcttgacctgttttaaacttctctggatgaaaaacgacaactggcttagatatctcttctggtaaatcaatcttttcatgtaccattgcagcctttacgatagtatgtttcatatagggtaaaagttctttatctaaaatagataaatctctctcggtaaagtcactattgctttcagaagctgaggaataggaccttgtaacagaagttcttgtataaccctcagacccgaggaatattttctcccatacagaattaatttgtgttttttttacgtaagtcatgtaaagattagtgggatgtgctctagcgctttcgcgaattgcttttgcatcgataatagggtcaactgaaagaatactcccaggtgctgtccaaacctctggcacctttaaaggcttaagcagcaacaaacccaaaaatatgataacaacaatcaagggagctatataaagaataatcaccttgtaatcttttatgtccaagagaatcacctcagtattgtaaactagcaatggaactaatataacaaaataactatttgatatagaaggaatgagaagaacccgattcttcatgtcattaatgattaactacataatactatagatgatttacgatatgctttattagatgagtttttaacacggttaaggaacagtaaaagaagcaaatcatttaacggcttcatttcttgttggtgcgttttcgaatataatatatgcaatagtgaaccgtagagatgggggagatatatgcatataatggatgattatgaacaacgcttaaaagatcttcgagctacacttggaacccttatagataattatgatatactcccggatgcctcctatcagatatttagtatcgaaggagagattagaagctttgagcagagaaaagaaagactaaacctcagattttctcggatagactgccatttatgcaagcaacctatttggaacgaagatgaaccagctaaacttggggacaaaggaagcctcctaatatgtccaaggtgtttatgtacgattaagcaggtgaaaggtactactgaaatggaacgagatcttgacatcaacagcccagggactgtaaaacaagattgtgaaggtccccttaaaatgctgcaatcgcagtttctaatccgaaaatctgaaaaattctggcttatacacgaggtagtaggtgagatctactatcgagctggccggcgtaaaacaaacctactacattcttggattgatgaattgattaatcgcttagatcaactccaagaacaaaaaaaatttatggaagggatgcgaaccttaatcccagatttgcatactcaaatctttagcttacaagcacaaattcaagatttacaaagtaaagtagatcgaatcaaaggtggaagattaccctttcgttgctctcaatgtaatgtctggttgaaagagaatggtattccaacgttttttggaaactacacaatttgtaatcagtgcaaaaagataatatcagaagtaatgactacatctgaagcagagaagaaacatggtctacctaagggaaccatacgccgggataactcaagaggatccctagagagatataagaaattaggattactaagacaatcaggaagcttatggttgcttcacgacatagttattttggacaaatataaaagaatcgaaacaaaagaggaagtgttaccagttcactcttctacaacaatgagtgaagaaggaataccttcagatcttcttagaagatctgcttcgatttacaaacaacttatggaacgaaaacaattggagaaatgagatatactgaataatgaagtttaattgaatacaactcaaagttgatcgagaattaaaacgttgttctatattttgtgaaggttcagttgatagactgtatgaaggatgatacagtaaaagataacataataaaatatatgcgaagcacgcatctgcccatattgggtaggtgcgttttcttatttctaaagaaaggtagaatcatatgagttatctgttaatgaatttgctttatatctcttatcggttgattaaggttttatcgagagttaccttgtacgtacttgggtatggattcgtcttcgcagtggtattatttttagtcataagtattgccaatgcaatgtaaggcccgattgttacagaaatagaacaataggagatccgatgagtatccttgaaaaagaataatcgtataataactcgtggagccattcatgtgtatgatgtcataactgctgctaagtattttaaatgatgtagagtttcagtagtttcaactataatcacggatattagtacccaagcattacaaaaatattattgattttctaagaaaaaatggactcaggtagctctacaaagcaatctcatttcagagatttgttaataatcgtgtatcaggctggttgaataagcactgagatgaagtgttaatacaatttcagttcataaaaaacaacatgggtttaagacaatatatttacagcagtatgaccatggcttataatacaaataacttaatagtagaaacggggaagcacctcgatattggttaaccaccaatattgaggtgctttttttgtttttacagttagaagggtagggagatctattgaagaagagaaggaaagttagggaggcagcacaaaaagctactaaagtggtattagctttagctttacttgcacccccattagtggcaaccggcgtatttacacccgctgcatatgcagcagtagatactatttctgttgtttccaacacgacatcattaaaagctgttcaatcttccgtagtaaaagtggaaatgaacgatcagggtaattaccgaattattttattaccaaacaccaacgtattttatggcagcaatgccggtaacgtttcaacgttcctggactataacggggaaagaatcaattttaactcgctacctttaaattactttagaattaatgacaatattattgaaatgtcacgtcaaaaagataatgttgaatttatcctacgtgtgtcgattgttaatgcaacatcacaaggtggatacatgaaggttgagttagaggcagtcaatcgaggtagtggtaatcaaaatctaggtggaaccttttattgggatactatggtgaacggtaatgacgcttcaccgtttgaagtgattcaaaatggatggagaaattacagtggtggggtgcagatcactgctttttacgcaaacacatacaacgtagtaaacgcagatcgagtttttatgggagcttatcagagtccagcaaacgccagcttgacaggcggcagtcctccttcctcttattacgtgggtcaacagattactgcaggggatacagctgcacagttttggtgggataagcagaccgtttcaagcggcggatcgaggaaagtctcaaccattgtgggaattggcccacagaatacaccgccctcatttgctttaagttctccagctgctaaccaatcttactacaaaggccaaacacttcagattgccggtactaccaaagatacggatattggtgacctactgactgtgaagtggtctatagatgggggggccgaaaatgttctttctacattgacggccaatggatctaatcaacaatttagcagtaattatacactgccttcaaccctatcggatggcgctcactccttacaggtgtgggttatggatgataaaggtggcgtttctacagcaaacacagtcaattttactataagaagttttgttgttccgggtcagcccgtaatcagttcaacttctaccaatggtcttacggtcacctgggacaaaaaagagaacgagtcagctgtgacctatgagttactcaatgtcacgacgaaccaaacgattaatgcaggttctgctaatacagcaacggttactggattatcacctaataccaattatgtctttaaagttagagctaaaaattctagtggttcttacacggattattctactcaaactagtagttatacctatgctaatactccaacttcagcaactgtcacgcagacaggaaactcaccaaccgtaaaatggtcagcgaatggaaacccaactgggactacatacaaatatgaattacgtgatgcagatagcaaagttgtaaaatctgggacaacgacagcgacaacgctgaatattccattggacggagttgcagatgggaaatataacgtgtttgtcagtgcggtaaatggagggggaattgcaacagcatatactgcggcgggccaaatcattaaggataccaaggcaccgactgcacctgaagtatcggttgctccttcaagttggactaatacatctgcaatagtgaccgtaaaaaacggaacagatgacttaagtggtgtacagaaaagtcaatacaaagtcggatcaaccggtgaatgggtggattataaagagccatttgaagtttctaaagaaggtcttcaggatatctatgctagaacaatagacaactttggaaatacaagcattgtttcctcttcaacagctcgtatagacaaaactgctccggaagcacctattttctcattggatccttctagctggaccaataaagatgtaaatgtgacgttatctcctggtacggataatctcagtggtgttcaaaaaatccagtataaaatcggtcccgggggtgaatggaaagactatacaaaaggcttttccattactacggaaggacgaagtgaaatttacggacgttccatcgataatgcttcaaatataagtgttgaagcagtggttgaagctaaaatcgataaaactggtccaacagcaccgaagttaacattgagtgatttggagtggaccaacaaaaacgtgacattcactattaccgatggggtagatgagggtagcggagctgctaagacgcaatatcggtttggagctacaggagcctgggttgattatgtagccgaagaaaccatttcagcagaaggtgaaactgaaatatttgcaagaacggtggacaacgtaggtaatgttggagcattgtcatcagctctggcaaagattgataagacggctccgtcaactcctcaagtcttattgagtgaatcatcctggacacaggattcggttacgttctctattaatggaagtacagatcataatccaatccattacgaatataaaatcaatgataccgagttcgtgaaaggaagtactggaacaattcatgataacggtattactactttaacggtaagagcacgtgatgcagtcggcaatgtaggagaagaagttgtcaaaaaagtatttattgataaccttgacccgtcaatttcaattactccgaatactacagattggacggataaaaacattgacgtttctattacttactctgatgtacactcaggagtggatccaaatcaacgatattttaaaatcactaacagtgcagaagcacccgtaagttgggattctgctgatgaaaatgaaaaaatagttactattgattctgaagggacatggtacgtgcatgccaaagtacaagataatgcagggaattcagtcactaccgtgacttccccgctcaggctacaaaggctgcccgatgtacctgaacatttaaaggtaactaatgtctctgaagggaccgcgaaagtttcttttgatctacctgaagatgtactcacagatgggtatcaatttgaaattgaaaacacaacaacaggtcagacttggagtctagactacccttcaaatgagattttagatgaagctctatcaggtggaaacaggtatgaatacagagtacgtgccatgaatcatgttggacacagtgacttctcaagtactgtttctacgctcacactaccacttgctccagaaaatgttgtaattcaaaaggttgggactgattatagtcaggcgagtgtttcctttgatcccgtgacgagcgcttcttcctatagaatcacagcgagagataggaacaatcaaattgtttctgatcaaatcgtacatggtacaagtgcacagttaataagtggactttctgcagggacggtctattccgtaagtgtaattgccataaatgaatccggagaaggctctagtcgaaatgctggtttcttatctttaccatctgctcctggtcattttgcaagtgtacaaatagaggaaacgaaaataacactcggttgggatacggtcacttcagcaacctattactcattgaatagagatggtgaatcgctatttgaaggacctgaactgacctttacagactctggtcttgaatcagggacgttatatcaatatggactaagtgcttccaatgaaacaggaacgggcgagacagttactttaaatggactgatgacactacctggtaaaatacaaggtttacaaatcgtgaatccgactcagcattcgttgggcttaacatggcaggcagttcaaggagctgaccactatgtgattgttcaagaaggcagagagtatttaaccgtccctagtgaacaaaccacagctgttgtccaagatcttgctccgggaacatcgtattcctttgaagtttttgcagtgaatgagagtggacaaggttcatctgtttcggcaagctctatcaccgtccctgatcaagtacaagaattaaagttagattcaataactgaaacaagtgctaccgtttcatggcttcccgtacctggggcagatagatatcgacttaagattggagaccgttcatttgaagttgcggggactcatctagaacttacggggctttcaggtagtaatgtgtacaactacacagtggaagcaggcaacaactctggttatagtgattctgtaggaggcgaattcttaaccaatcctcactcgcctaatcaagttgaagtgactgagacgactgagacgactataagccttcgctgggaaacagtagcaaccgctaattcgtacattgtctctatggatggacaaattgtcggaactccgacttcagcagaattcgaagtcaatgatcttattccaggttcaaagcatacatttactgttcaggctataaatcaaacaggtgaaagtcagaagacagcttatgtatggatgactaaaccttcattcgttacaaatgttcagtcatccccagcaacgtataaagcagaagtgaattgggaacccgtaaccggagctattgaatatattattgaacacgacgacaacgtattgtatcaagggacggagacttctctcgaaataaccggactttcggatggaacgaattatgaatatgtgattcatgctgtcaatgagtttggtgtcagttcccagaattcaaaatttggatttaagacgctgccacgaaaacccgttaacgtgaatacggtagacatcgagaaagagtcactaacgcttgatctctctgatacacaagtaacaggagctgacacatatgtgattaaacgtaatggggtacttattgcgaagattccttcatcagatatcagatacacagataaaggacttcttccaggtactaaatacagttattcgattcacggggagaacactagtggagcaggagaagttaggacggttcaagttacgacaaagacagaagtcgtaaatgagaactctattgtagttcatcctgaaacgaatcaaattaacgtgacatggtctccagtcaagggagctgtttcttatcaaattttaaataataaaacgggcgataaatattcaacttcgaatttggagagtatcattcctagcttaagtgcgggttcaatttattcgtttaccatcacttcttttaatgtagaaggtattgaatccgagcctcttacatttacaagcttaacaaaaccgacagcaccatctacagccactatcagtggtataacggatacctccctaactatcgatttatccatgagtgctgttcgcggggctgaagagtatatcattgaacgtgacggtaaggaagttggacgaatcccgttgaatgaaacttcatttaaagaagatggactagaagctggagaagaatacacttatgttattaaaacttcaaataagtcaggtcagagtgtaaaaggatttgcactaacagcaagaaccgttccagctacatcttcaaaactagctgaagttctgtctgtatcagataatagcgtatcgatctcgtgggataaaattcagggggcagaggggtacaaagtttattttgactcagaattaattactataacgaccgaatttagtgcatcagtggacaatttaatcagtgcacaaacgtacaataatattcgtgtcgttccatttaacaatgcaggcgacgccatagcattctcggtagaagaatttacgacgctcccagtaattaaagggttgatcgtgaattcaaaacctaaaacaacggaagcggagctttcatggactcttccattgaagaatgaaattatggtcattgagtatcagggcgaggaagtttaccgaggacaggaaacgaacttcacattaactgaattaagagcgggaacaaacgaagaggttacatttatcacggagaacagccaaggagatcgatcagaagaatttactcattctctacttacattacctgcagcacctccaactgtgagttacacatctacatcgaacggagtatctctagattttgctttaagtcaggtaaaaggggctacagcttacattgttcaacgaggtggagaggaaatcggccaagtcacagtgacggagtctgtatataatgatgaaaaccttgagccaggaaagacatataaatacttcattagaaccttaaatgacacgggtataagtgaggaaggttttgcattagatgcaacaacactacccgctgatatgaccatctctccatctattgataaaagagatgtcgatggagtagagatttcttgggagcctgttataggtgcaacaggatacaacctatatgatgatgatacaatcattacatccacggagaacacatcattctcattgactggacttcgcagctctacgaaatacggaacataccgaatagttccatttaatgaagttggtgaagctaaggggatcgatgtgccgatctttgagacgctaccaagtggagatttcgaggtaaaagctgtaggtaaaaccacgaatgaagttgatttcacctggacgctcccatccgccaacgaaattttcgttcttgctcatcatgggacagaagtatatagaggaaaggatcagcactttacgctgaaaaatcttagtgggggaacagtgtatttgatggaagcttggacagagaacgagaattctgaccggagtgaagttaaagagatcactgctcggactttgggcttcctcgcaccttctggaggaaatttcagcgggcaacctgtatcaaaacctacagaatcaattaaagatgtacctgctgatcttgaggtagtaccaactccgcctgtaaaacaagtgttctttgaagacatagacagtacttttaataaggaacagatcatattcttggcgcaacaaggagtaatctcagggattagtgaaactaaattcgagccgcaacgtgcgatcacaagagcggaattcactgcattaatcgtccgtttaatgggaattgagtcggcagaatacaaagggacttttaaggatgtaagcccagaagactggtttgcagaatatattgcagccggcattaaaaataaggttatagccggtatgggaaaccaagtgttcgcaccacatgaacttataacaagagaacaagcatcggtgatcttagctaatgtgttgagaggaatgaacgcttcaggaactagtgaacagcagagatttgtggatgagaccaaaatttcaggatgggcagctgataaagtaaactacctatctgaattaggattagtcaacgggtatcaagatggttcgtttcgtccgttgaaagatctcactcggtctgaggcagcagcactaattttcagattgatggaagtggtccacaaggatttggagaataataacaagaagtcacaataggaaggttaacatttcctaatgcaccaaaagtatgaaaatggtaaaatgaaaattcattaggttacgacaaggagcaccttgaaatggttttttcaatttcttggtgctccacctattgaattaggaggtaatcacttgaccctacataaagttccatcaaaccataagaaagaacttagcgaaattgagtttctccaattagtacttagtcttctagaatcagaattgagctattttgcctcatactactcagatgatcgtatctcatgcaatcagagagaagatgaagaacagttgaacttagaaatacaaaatatccaatgtagaattcaaacgttaatcgatgatcaacctatgattaatataaaagtaaggaaataaatatttccgagattaatgtttgactatctcgagtgatatcgtttgatacaatagggtctatgaaaataataaatcgaaagcaattacaacctaagaacattcatacctgtaccaaacttcataattccacgttcctccaatttatttatgaggttttcccatagaatcatccttggttcctcaagtggtgcctttgaagactattttgatcagagagaacttctaaaatatgagcataagtggatgacagttacagaaaaaacgataagcgctataatgataaaatagtgatctgtttgttggaggatgaattaaatgctggaaagagagagagctcttgatcccgaatcagtagggagaaaaatccgtgaaattaggaaaataaaagaatatacacttatcgatctcgccaataaactaggttatgctacaggtaaactgagcaacatcgaaaagggtaaacgagctaaatttccctttgaggaattagttgacattgctggtgcattagaagaaccggttgagttatttattatagatgaatcggatcaatatataacggaacaagaaaatattagacagcaaataagcttagcgaaacatcgtctcagcgtaggtttattggacgggttgaaagcttctcttcatgaactgcaagaaaatatagaaatactatcatttaagaaaatgataatacacattaactttctttggggagaatactatagagagctgttggattatgacatggcctcggagtattataatgaagtaattaatgctgaagtctatgataaagatagcgttgaagtaaagatacgcacctataatgctcttgcgtcgcttcagttacaggagcgtcatattaaagatgcgatcacaacacttaaaatagctttaaacttcgttgaaaaagatgacagggttcttagtttagatatttcgaatgtacattataacttaactcttatctatatacacatcggttatatggatcttgccgaatatcacgtacaaacttgtattgaaacaattgaaggaagaagcgaacagacttattatcatgcactctacctattatccataacctattggctcaaagaagaatatgagaatgctagaaacttgttatttcgttcgatgaactggtttcaaagacaacgcgacttagcaagtctatttaattcactagagttcatttttgtaatgtatcgttttaaaccacatcttattattgaagatatgtttcaatatttaagagaggttactgctgttacagttcccgaaaacattgtgtcccagaaagtaagatgtcttttcatgttagtagagctggaaatagaaaaaaaagaatatctcgtagcggagagtatacttgccacatgtaaggaatacattaaggaatattcgttctctgaaggataccgagcatatgtactagaagcgttgcttattagagaagttagcaaagatgcgataaaggagcgctgtgctcttgagaaggcactcagcttttttcaagggtctgatcgctcacctcaaaaagcacatattttatatcaactcgggaagttaaacagttctgacaataggggtacgatgtatgaagaggctcttagcatttttaatgataatcttcatgaacaggcgtattttagtcagaatagtttttcgattctccctcacttacggtattaaggaaatccattggacttagagaatgactcaagatctcgtttttaaatgttggtgtactcactaaccaacctagcgacaaaaaatagaagcatcttggtgagataacccctaaggtgcttctactgtcaattatcattcgtttgatcgccaaacttgtgtacgtgatttagcacgacttttttgcttctgtttgtcttctttaagtttttggccaagataggtaactaattgatttttctcttgtagtgtaatttgtaaatcattgaatagcaattcttcaagttgttcccaagcttgttgtagtgctttaacttcaacttctttcttctcatccaagctagctatgtattcagcatctacatttggatttagagcaggattgatttcactataatccataggctcacgtgcttttaaaatttcagttaattcgttcagtattacaattttcctggagttattgttatccatgttacgttcagacattactggaccgcctttctaaatacgttcctaatgtataaactaacccattctctattcaattgtcaaaacattgagtatcatactcttgtctatcatttagcaaggggctataatgaaactagaaattgaatattcggaaactggaagcaccagttatagcgagccttcgctatagctggtgcttctttttttgttttaacaggttttcaaggtttcaatttcataatcagaataagaggtagaaggaggatgccaatggaaaaggttgctaacaacaatacagatgaaagaatgcctccccaattaagatcgttcataaggaagtggtggatcgacaaccgagagcgaatggatgagtggtatcgtatttattttcatacgattatagtcacaatgatgatagtcatcaatatgtggctcggattttcatcatttcttattttttttgcacaatggtttaatgtggattccgggactatgggttttttaagcgttttctttgaagaacctcctacactgttaatcatgttacttgatttcatttatgttccacttcatcattatgaaacgttgtggatactgatcgtgttaaattttcctatcttaacttggatctattccacggtaacccaacccattatgcgggggtataagactttaattagctggacttccaaaaaaggaagaatagctgcagcaattctgtctggaatacctttcttatgctcattcacagctgttttttcttggtatgtgcgaaactacctcttcgacttctttgtgactgttcaatcggacaaagactatttagtcgttaggtccatggagagctttgggtttgttcttatgtgtattcctgttttcatctccctctttgcagtgtacatagttgcaaaagaattctatcgaaatgaagatctccagttactgttttacaactgggagttttctttacttgcaagccagtccttcacgctgcgtggtaaatcatctgacgtgattgtcggatgggagaaggatacgaacaaacctatcgtattgactgaaggctcacgatatttacacgagttgattgttggtgctaccggtactggtaaaacctctacatctattctaatacgtatcgttcaagacttaattcgaatcgcaagaggtaggaagttaggtgttgttgttctcgaacccaaaggtgatttgatccgagatgtgcaaaagctttgcagagaactagggatacctgaccataaaattaaaattgtcgatccaaccgatttggtaagatctattaagtttaacccttttgttggaccactagagtcagctgctgaaacgtttagaggcgtattagatgccctggcaggtgaccaagatgaattttttaaaggtcagcaaagtgaaacggcaagtttgtatacgatgttaggaaaaatccgttatggagatttgttttccattgtacaaatgcagcagatgtacacggatcctcggtaccttgcgaatatcacggaggaagttcgtaaagcaatcgatagcgaacaagctgatccagaacttgacccaaacaagaaatctgttctccagcgctacgacaggatcgtatcatactttgaaagtgaggtcctggattataaaacgttccgagacaaagaacaaaacgttcatccggtgacttatccatcagggcacaaatacgaaggtaaacaaatcattgaaaacaaaaaagacaagtacgttgccggtggtaaaaagtatctaaacgatatcgtcatgaatgaaatgttatcccaactcatggtggctaatgaaggggaagaggcattaaatatagatcaattccttcaagatggaggcgtgcttctggttaataccgcacttggtgaattagaagaactaagtctatcttttggacagttctttattcgtcaatttcaatcctctgtatttcgacgtccaccagaagaaaatgggtataaacgctgtcctgttttcctcaatatcgatgaattcccactatacattaacgaagcttttgtgcgtttgttaacacttggtcgttcatttaaagtcggaacgcttattgcaattcagtcactgggtcagctgaaagctgttgtgcagggatatgacaacactgtgctgaattctgcgcggaataagaccgtatttgggggaggggaatatgaggataatgagcgcttctctaataactttggtgaagaagtgcaggtcgaagaatcttccaatgagtcaatgacaccggtcagtatgcctaaccagtcctgggggatgcggcataatatgcaaagaacccttgcagcgagattcactccaacggatataaaggagcaagaattcaaacacttcattgttgatttcgttgatgcagatggtagtgtgaaagcccctacccgtgcgtacggtaagtttattaccgaaactaaatacctttcgaagtttatgaatatcggtaaaattgaattcgagacgaaagaccacaaacctttagctattgcagctcacaaactggctcacatccacttattaaagccgttgttcaacgataaagcagcagacgatacgggtgaacgtgaatctgcggacatctcagagcagccagtgcaacagaaagaagaagatctggtggaactgttaccgacttccccatccacgatgacacgtgaatacaatgaaacggagcagtccgcagctatgcttgattcatcagtagctaacgtggtagccatggatgatttcttaagggatcggggtcaaactacaaccaatcctttagaagaaaaagagtcagaacctgcattgattccagtggatgaagaggagacgttcaacctaacgagttcaattactacacctccgaaatcaatcaatttattactggaggatgaagaggattatcgtttttattcagaaacattacaggatattagtatgaagcccatgacagataaggttgtttcagaaaacactgattcgaaagatgatcaacagtccgcagacctgagcctttcactgccttcaggtgttgaaagttcattgaatgacttattcataaaactaggtcacaagaacatggatccgcaagatctaggtagcgaaccagaactaacagattcagatgagggttgggggattcaggatatcgaaatagatcaagtgactgaacagaacgcaactgatcaaacaaaagaatacattgaacatcagttacccactaggacaggtcaagcggatcaactttctaacacctttattgatccggaacttagcgacttagttgctacggggaggggtgcccgaactaagcaaaaagaaatagctcagtcccgaataaccaaattggacagcactgttatagacgatgattgatagttgacaatatggaagattgtcattactattataagtaattgaataagttcggatcggggaagcacctcgcacacatatcatcgacatgtgtacgaggtgcttctttttttgttttccgggcgaacatgtatattctcaaatagattaggaaagctgaggggtaactatgcgccaaattgaacaacgctttgataatgttggggatgaaaaactaggatgggctgatattaaagaatcgcagcgtgtgaaacaagttctttatgctgaagctatcggattagaaacattgagtttgggtgacaaaaaggaagaaatgttaaaactcaactacaaaggagtttttggttatcttcctaagtcccggattgataattacgaattcaaaggacttcatcattttctgggaaaagaattcgaatttgttgtagagacggtggatatcgagggccattggtttttagctgatcggattcaagcacttgaggtttctgcaaggcgtttttggaagtctgctaaagtaggacaagttatggtcggatttattcgtggtattgatatgtctcgcctgtatctactcgttgaaggtgttccagtcgtgatgaacagggaggaagttagttactcctatattgaagatatgcgaagcgaattcgagatcggtgatactctcgatattaaaattacgaaactcgaagctcctacagaggaaaacccaagtgggcttcttgaagtcaacgcgaaagttctatcgagagatccatggggacaaattggcgactacaaagaaggcggatcatacacagcggttattactaaaattcacccagagcatggtgtgtttttggagcttgttggtgtatctggtttaactgttcgcacgaacttcccaccaaacgcgaatccggatgtgttgaagaaagggaaaaaagtaaccgttaaaattctcgagattaatcaccgggatagacgaattaaggccatcactatccttcctcagagatccatcaatgctggaaatagacgcggcgttcgtgtgatacactaatggttacaaattcaagagttcttcaatttgaacaatctggatccgatttgcaggcgaagcaacatcctgcctcattattccagacagtacctccagaaatgaatccttatggccaggattccccaggagacattggagaaatgttactgccagacggatctgagtttggattatttagcgatccgtatgcacagcaaatcttcattaaagcaaatgaaggaattcgaaatggtcagtactggttagaaacgaggttatcagatggccatttcactgaaaaagaagttaaactacttgatctgctttctactattagaatagcaacaagaagtcagatacacagatccttaaatccaggtcaagaagatgatcggagtacggttgatttcattaaaaagtgcaggaagaatggagttatatgtgccttttcatgggtttcacctttaactggtgctcagcagcgtaaaaagcctcaagtatatgctttaactaaagcaagcgcacaagcagctgaacttattttccaaaagagacttccagacaagttctggctccaaccgatcgttttcccacctgggcgatctccatctatggatattttctttctggatttagcggcaaatgaattgtatagcgaattggtgcggattgaccgcttggttgaatggaccagacgtccgcctatcaaaatccccaatgcccagtctaatcattatccttatgcctcctttagagtcattaaagatataaatgattttaaattgttctggatagaggtatttcgtccatctcgagactggatcaacaaagtcattacgagatttcagcgtatggaactcgcgttcactttcttacccgaacatcaaagaccaactcgggttattatgattgtggatggagatagccgggttaagtttctttctgaattgcaacgaaagtatatgccaagtgtcgaggttcgctacactacggatgaacgtttactttctggcattggaccagaaacgtttatcaattaccatatggaaaaggattctttgatcggtgtttccataccgtatttgaaagcaggatacaaggggatgacggcttcggagtattattcaaatttgcaaccagatattgaagatgatgacgatatttaatataggcgagatagggtgtcttcaaagacaaatcattgctttttcataacctgatggttttagttgacaacttatattcatttatttagagtgtgaatataattgttatgatttgataattattacttttaataatgtagatacaagctgaactatataaataaattagaacggggactgaagaagatgagtggtaattttgagaactttccggttgatttaattattattagcgataaattggatactagaacgaagcttaagtatctgaagatgttttatattgaggaacaaggttacgtggcagcaagcacaagtgatacatcatataacctttttaaagtagtcgaaaccgaaggtgcatcgtctgagctacatgacattgtggatgatttggaatggaaacgagcgaatgaccatcttcttacatattataaagatgtattgaattaatagaagtgtccccactttcctggcattcagccaggttttttcataatcacaatgttttgtgccatgaatcttgggtaaatcttgcgaattatgtaatttggtagacagcaccaaggttgtagggttttaacctattaaagattcggataatagacttaatgctgccgagctattacaatacaaaggagaattctgcggaatgaaggtgagtaaagatatgtctaaatttaaagacctaatatccaatgagatttcttcccttgctcaaaaaacggttgccatgcaaaaagttggaatagattccgagaaaattgagagtcttactcagagcgacttgcagattatctcaaaagggtttatgaatagtaatctgcacgagttgaaacccctattggagaaatatagagataaagagagggagctattaaagaggtacttaacgatacaaagctccggtcaaaaaattacagaagcagatcgcttagaacaggtgcatcatgatttgattatcaaagcgattgaactggcaattcaaatgaaacgggaatatagaaaacaatataactcgcattctcatatcttagagaaaaatttaattaaaggcggactctttcttagtggaacacctcacgggatgaacaaacttacaggaggggatatcctggagttagaacgacgtggtttccgtcctatgatatacaagaatgataatggggctttattaaatacttatgatacaagagtgttaatagggctgtttaaattgtggttgaatcaaggcaagaataaacaaatcaagttcgaatttaaggaccttgccgaggctatgattacgaaaccttctgggggagagtacaaactaatccataagagtttaaaaaatatcgcggcgacgtggattgagtataaggaatactttgatcctgcgatctctgaatactactctgctacgattcaacatagaccgattaagagtttagcctggattgcacggactcaagaagaggaaggaaaggaacgagctgcagtaataactttccatgaagtactacatgattcattactggctggcaattatcttttcattaatatggtgatttacaatgagttgcccacctcctatgcaagaatgatttatttaaatattttagatgctattgagaatgggactacgtcattctcgttggatcagctcatggatcatattattctgaaagatggaaatgatgcgaattttaatcgtgcaaggaccattcggacgatcgaaacatcttttgcgcacctgttggatgcagatatcatctctgatttcaaaatgtgcaaaagcaaacgtaagtttacccatattgagtttacaccaagtgagtggcttcagggtcaccgaggcaagacgggagcaattgaacttgactcgtcccaaaaaatgctttgagagctgttggtacaggctctctaagtacaattttgtttactatttatttctggtccaatattcaacatacattctactccgtaaaataacatacattttactccctaacaaaccatacattttactccgtcatggtttatttcttgttcttgtttttttaccctccagaatgaaacgcacaaatagcgagatggaagtttaaaaactgtggattattcggtcgaatataaaatatatttcgcgaaaatcacggagtagaatgtatgttaatgaacggagtggaatgtatgttggtgggagtaaaaggtatattgtagggagtagaatgtatacttaagggagtggaatgtattattgaaggaagtatacattctactccgtcattgatcatacattttactccgattgaccaacaaagatggttaatgataatgtcgaattaggtaaaaaggtaaatcattccttagacttgtggataaaattagaatctccattttaaggggttctgcttgaggaaaatcattgtcttactgcgtcaagtttcatggttaactagaccaaagaaatgtctttaaaagctgttttagtttttatattgcgaattttagcgatggatcaatcccattctaccacttacatcattggagtccatttatatagagaaaggaggcccaacgtgactgagattgtatttgaaatcacccaacctaaagataaagaatccggatcaaaggatattgcgctaaccgatggttttattgatgcgcttttttcaatctccgaaaagatacacaccagtgaaaagtttagaacacgttctaatggagttggccggttagtgtggcatgtgacagaagcagacatcatgctcatggttacactacacgtgtgttttaattcagaaggtaagcttgaaaatgtatcaagacaccaaatctataaaaagctttatgatctctatgaagatccgtgttgcgatgatcaattttacatagcatttgagaaatttgtacgtttgggcctcattcaagaaaagctatctggcgtcacaagtgagttttctcttacaaattttattaatccggatacgaataagattagtcgtctggttgtcgtaaacccttttgtcttttctaagggctttacggatcttcctatttctgcgcaaaagttagtttttgatctgcttcgtaaacaaggtaacgagaaagagaaagaggtcttttactggctcaataaagataaggggatattaaaacagcttcataagaagcatgtgtacgagttgaaaaatatactccatcttctttcaacgacaaccatacaacatcagaagccaatcataacatcttggaacatcgaggctagaagagggaccacctcaccaaaattgacggtaatcgtcaatgaagcttatacaagcaaatatgttcctggaacccaatatagagatgtcttgcaaggcaaaaagacatatagaagggttattagacatctcaagaatctcctctctaaaaatttgattggagagtttgagtatcttaatgatggaagtgacttctatcaattagttcgcttgctgcgtgggaaaagttataagtatatggtttatgtgatcgagaaaatcagggaattatatgaaaagaatcggatgttcccgattaatattatggaattcataagagatgagatgcgtcacaaaggtatggtgacttatctggaaatcgcgaagcaaacgggggtatataagtttatatgccctcgtaaattagatgagaatagattatacgaatttgcagctgcagcaagtatgttcagccaacgtgaatttactaaactttgtttggcttccgtcagatccttagaaggtagttatacaaggccaccggcatttagcctatatgattatactcaatctaatgagttacagtattatcttgatgcggtaacgatgaggaatcacgctttctcactaaggaaatgtcctgacaaatataaagaacttgagattcaagcacttattcgcttagagaatgaatatgaaacacgagcagtgcgagagtggatgatcaacaaaatagagatgttgccagcttggactacaattccagatgttcctctcgacttcaaacttgaacatcatattctaactaaagagcataccgcctagccttctttgatcagtaaaaaaagagggctattcgttttgatgaaatagttatgtctgtgaattcttacgacacagactatattgtaattgttaagggagagaagagggtaaacaacggatcactacgaaccgttgttttttttgacattgttcatataaatacagaataaaaattgaaatcttatcagaaagaattaattttcctcgtacaaatacagaaagatactgtagatagtttgataagatgtatcatcatcatatagttttcatataaatacagagtcacttagtagattaaattctgtattgtggacaattgccaagtgtcataagtcagtatattcaaaagtattttcctctccaatattttctgtaatcatatgactgatttttagttattcctgtatttatcagattcgtattaccatagttctgtatttatctgttgataagtctttacacgtatatgggacgagtatgtacccggttctatatcgatcttttattaagtagatcatttagaaatagtttctcctacagtcttcacatcattttatttgctttctcaaaaggattagctatggtaaaatacagatataccaacagctgttaatgcctataagtcctagcttgcgcaaaaggacaattctatttcaatgcacttctctttcgagtgaccaactatctcatgctgagatacctattcctttttaggatgtattggtcattggaaagagttagtgtatttttttgtcgttttaagaatttaggaaagaggagaaactgtgatggctaaatttataagtgaagaaacgattgatgaagtcaaaaatgttacagcgtatgaattggctgtacaaatgggttacagcgtaaaaagttcaggcacttcttgggtcacgtattgtcccaacccgaatcactgctcagaaaaaagacttaaaacatatatctccaaatataaaggtatttttaagtgctttgatggaggaggttgtggttgtaaaggtgcagatgcgataaccttttattgttggagtcaattcggagaatgggacagaaaacacttttttaattgtatcttaggaatcgcagagatcatgggaattaatgttgcgtatgaagatggtcaatctaagcgttctgatgaagataaaactcccaaatatcaggtgcgacctttcattgaagaggttaaaccgcaatcggatgaaatatgtgatcgagtgtaccgcagattcctttccttgtgcccgatatatgaagaacatgtccatgaatggagatctaaaagaaaatactctgatcaagaaattgtagcgatagggctccggtcagtgcctaagagttacaaagaattgaacataattattcgtacattattaagtgaaggcttctctttagagcgcgttccaggatttacaaagaggcttcggaaaggcggaaatcccattcatgagggagattggttctggactatctctgcatcggggaaatactttattcctttgcgaaatgcaagagggcaaatgatcagattgcgtgtatcaaccggaagagatgataaaaagtacatgtggttttcttctgctcctaacattgagtatgttgatgatgtatatgaaatgagaaaggctggtgcatcctctggagcaccattaaacatcattgcaccttcttcaatacttcaagcctgggagacaggagtagaagtcactaaatatcttgcgtcagatgttgttgtttgtagcgaaggcgaacataaatcctatatatctagcaacatacttcaaaaactattaattggtatacctggcgtaggtatttacaaggatgtgatccccctccttcgtcaatggagaacccaaaagctagtgattgctatggatatggatgctctcttagacgaaacgaaagaagcaggaaagaataagtacgtatttgaacatctgacagagtttgcaaagcaagctttagatgatgagggcattgaagttgtcatttggtgctgggatccacaattggggaagggactcgatgatatcttattgcagtctattttacccattgaaatagacttacgtaccaaagcaagacgtctagttactttatgagtgagcgttgttaaacctattctttagtatatgagaaggtaaacgctcgttgcgacgtttaaagttattagacgcaaccgacgattggtgttattccccaaagtgtagatgcgcctcatatggctgatgataagagatattacaaacgatacaactttagatcggctcctatggaagattatgaagtacgtgatgtaaggaagaagacataaccatcctaatttgaagttgaacttttctatacactccgatgaaatgaatatagagaaagaattagaggtgcaagtatataatacttctcccgtgatagcagaatactatggagtaacattgtatattgaaaaaaaattcaattagtaaacaatggtggctttgtgtttgataaagaaactgtgctgttacatgataatgattaacttacacctgtcttccagttaattcgaaatttcaccttacccaatgctatgccaatttgggaaggagagccctttcttctgggtacaataaaattgatactgtaagtgaaaaagatttgtatcatataggatggaggattaccggccctggatttaaaaacactaattttagtatagtaaatctgtagcatccttcggggtgctttttaaattattgactgactagtagttatattggtcactatagctgcatttgtttcataaaacataggtagactgacactcgttgttatataattgtagtagaaaagtaagtgtaaagtgagagccaagtgtagtatgtacaaatacgtcattattataattcgcaaagttatgtgagtgaaataatactttcattaacaggatgaataatcatgctatatgacattaaattttcttctgaggttgcaggtaagccatttaaatgtactgttaaggcactagataagggtgaactagtccgcaaggtcacactcgagtatagaggaatctacaaagtcattcctgataatccaaacaaactcaagcatcgtgacaaagtgggtacattagtaggcttcaaagtagataagttaaataacccattgaaagctagaataaagtttgatgaaactggaagcataggctatgtgaaacttgaaaatttacatcattttaaaaatgaatagataaaacattctttcattcggatgtgatggcatggttaaaattaattttcaaatcaactgtagcgacacaggtgaaacctttgcctcatatcccgattacctaaatagcaaccactggaaagggatcaaggattgatttggtgcatcagtctacgtttttcacatactatagttttagtattgaaagagtacatcgggtagacttatcttttatttaaaatggagatgcttatgcatccccaacttgtacttaatcaattaaacttttttgggttctttatctactattgtacctgagttaattgtataaccgtaaatcaccttgtatcttacttacaccgccgtaattaatcacttgtattctataagttcccgcgggaatattgttgaagcttcgtatagtgttttgatctgtaaaagtcccacttacataaatactttgttcaaaaccattagctccagagcctattaatttatattgcactaatggattatacttaggatcaactgttttttgatgtatccaaatactaacttctcccgtattggacacttggaaccatgatgattcataaacagaagtaagactaaatgaagttgaatagaccatgctttgagctagtgagacggtagaatttgaagaggttcggttattgacttttgtgtcaacttgaatgttagaaatattttcgttctcgtttttatgttgcttgtttacatcgatttctgccgatgctgctgaagatatactgctcaccagaaatccaattgataaaaatgtagttataatttttctcatgaatattgggcctccattatataaaatatattacatactaaagatagttcggcatctatttcaattcaccttccatattgtgatatttaattacaatatatttatttaatgttaattgttacaaatgtcactaaagcattctctttattgttgtactatatatatgtaatatatttcttttataaggagagatttgtatgagaaagaaaatgttattgcttgggttagttttcattctaagtttgctcggcgcctcatctgtttttgcagaaaccaacaatgcaattgtacaccctagtaagttggttgatactgcgattcccgtagtaggtcaaggtcaatacggaagatacggtctcgaagtaacaaaaggtcaagttcacattattttggatgagcagcaggcagactatagctggaaaaaagtgcatgaattcacattgtatactccttctggaccattggctcactattatgattactggatgaaaaatggaaccagatatactattactttaattgctgtaagagacaccgaacttggtgttggatatgttagaaactaagtgaataaaaagaggactgtctttcggtcctctttctttatatataattaatctttcttagaaaaaagaaaaagcagcccgaaggctacttaaaatgtagtaatgtattggaaagattattctgatacaatcaacccacccttaatgataacctcttcagttccgaatcgctctccgaaaaggcttcctttgagaactacacttccatagttgttgatactacctgctatttgacctccgctctctacggttgcttggcctccagaatcaacgctcagagttccattgagagtgccctgaattactacctctccaccatcaagaacaccaatagccccattgacacttcccttaaccgtcgcaattgcgttattgcctatctcaagcgcgccttctattgatccttcaaccagcagcgttccagatcggacgattatccttcctatatattcgctttagacaaacttctgaatatagctacgatctaaattgaaaatcggtacatccttatctagaccacatctagctcctatagttacctcgttttctgtttctagatcgaattgttcttttgtaatgcaaactcctcgttttaccacgtaagttaatattcttctcttgaaacatccctattttctagtgaataatgtatttcgattttcatagtgttctcgtcctttcatgtaaactaaccctcctatgtatcctgtttaaattctaatatgttcaatttatttggaagttttaatcataataaatgtgaaaaaacccttaataagtaataattttaaataatcctgttattccaaatcaattggttgaagtcctcagaacacaacaagaaaagtatgatgctttgaaaagaaaactgggcagagagtttcttgatctcgatttggttatattcaatttgaaaaatggcggtactgtttttccaagtaattatgatgaaaatctatcccaaagatgttaaaagagcagatcttccacatataagatttcatgatttgcgacatacacatgcaaccttactattgtctaaggatatcaatgataaggtgatttccgaacgattaggacacagtaagatttcagttacgttggacacgtacagtcatgtgataccaagcatgcaacaagaagttacaaacactttagaagaaatcgtatttctgtgacgcatctgtgacgactggcatactgagagcttaaaaaccgttgatacaccaaggtattttgaacttttatatcatgtgcggtgcaactaccgtatgccattttggaatagagtcgtaaagtactggtacacgtcatgcacccatatgggacaagcttgataatacttcagtataaaaagggatttgttagacgaaaatgatgctccttttaacaatatggatataatcacatcaagtggaaacatacctatttatattggcgacttagaagatggttgcaggaaaggtagcatttataactgagtggttcattgataaaaaaagaacttcgatagtacttctcttagccgcagaaaacaaggtcaattttcttcaagctacatacgagaataatactttgaaaaatgatttagatgagttgatgagggctcaaggtattaaataattataatattgtaagagctacctcatttctgaggtggcttttacatgcccatgaaagcatacttttaactagcagcgtaggaatacaacatcgtatgtgttttttaacacacaatttgtatgagaactcaaacacattatatgtgagagtcatcgcacatcctgttgcatatacattgtatatgttatatgaaaatgttatattattcctaggagactagtattttattcagctttcgtgagtaactagtagtcatattatcaggtgatccaatcatagaatgaactgtctaatctaaattagataggagatgattgcattggctggcaaaaaaggaggaaaacgaatggctgttagtcttcgtgaacgaccaactcttgaaggaaaagatgcagaacgttttattagcaaaatgaaaaaaaatgaagagtttatgaaaaagcatgctgcaagaaaaattaaggagtaccatgacagactttctagaggagaatgaaaattatacactcacacacaaaattatatccatagatgacctagctcatttaaaaaattttaagtgtggtaatggttctatggatctttttcttgcagttgaatcctacccttctcacatagaaagagaatcaagcaccacagttgtctacattaacgataaacttgttgggtactatacgttgcgacacattaaattgtcctcattgttaacaacaatcactccagaagaagatcgcgatgttttagatattgcacgactagctgtagatattcaactacaggggaaatatataggcactgcaataatggaaaatatattaaaaatggctgttcaactcaatgaacgctttatagtacttgacgctctaaaagagaaatggagttggtacgctaaaaaatttgattttgagccactgtttgagagtgacatagaaggttctggagaattagttacaatgctaatagacttgtacgatcaagatttgatagaacgatactatgacgaataacaaatgaaataccaaatttacatagaaattagctatggaagccttataaacagggctttttttatttgtccaaattttatattggaggtgattttgcgtgactgcctttaatctatttttaatgtgtttaaataagtctgtagtatattgtgcagatatttttttgtctgtcagtccaacaaaccataactttcatcatattaattcgcaaataagtaaaaaagtatctctgatctcttcttgggctaggaactagttaatttgaagaagattagaggcttttgacagaatgtcataagtgcagcagacgaggcttttaaatttagggtatccgtctggcatctattagacaagcgagaatacatctttgactggagtagacaatagaagcgtatagaacagtatccgtgatgatcatggagagatgatactttcgtaatacgtttcggtttaggtacaaaaaggagccttatttagtgggaccgttgtttatatgtatacatattatttaaatctaaatgtttcaaatgtctcaagaaattctgacaaggcataaaatccaattccaatacagacaaatccaaggataaaacaaccgatgattgaattagaaaatccacttccttgtccataatgttcaccacaattaggacatataattgcagatcttgagattggatgcccacaagatctgcaaggttctatttttttagatctcaatcctatcaatcttctgtagatattaagaaacactccagcaatacccattaagcccagtacaaatagagctatgatcaatcctgcaaagaataccataccaaaaatctcactgatgttatgaatcaaatcatttactaactcctccaacgttaaagtcaatccggattagtctaccagacctaggtatatttttctatcagagtgtatggaagttacagatccttaaataaatctaacaaataaaataaaagcccaattcctccagccaaagctacaactccggcgaaaaagttggctaatatactggtagagaatgaattggctcttccgaaagtttggccacaattaggacaaagaatagcttctttagatatcgtatgactacacgaatggcaaggttctaagctagaattattacctttgattgccgaaattatatttccgaacattctgccaaagaaacgaatagacatataaaagaatgtcagaatgaaaagagattgtaatgttgttccaactataatgcctattttctcttccatgtattccctccaaaatttaatcaatccagaatagtctatcagacctatatgggtatttccatcaatttctattataaaaagcaaaaaggagtgacttccgctagggtgtcactcctttttggtctttaatttacttccttcaataattcctcatagttattccgcacattacctacttctttggggacttcatatactcgcatttctgacgcttgatatggtttgagcagactgagcagggactggacatcatgattatctcttccaagccattcagcctcatcctctgagcgcagaataaccggcatgcgattatgaatgtcttccatgagactgttaggttcggtcgtaataatcgtgcaagtactcaactgattgtcgttttcgtctgtccaggtatcataaagaccggcaagtgaaaataagcggttatccttcatcagaatgcgcattggctgcttctcctttccttccttccgccactcataaaatccgttcgtggggatgatacagcgtttggagctgatcagacgtttaaaggatggcttctctgctaatgtttctgctcgggcattaatcattttgttcccgatcttatcatcttttgcccaagtgggcaccagaccccagcggagagcgcctaatctattaccgtttttacttccgataatagttgggatgtactgcatgggtgcagcattatagttaggcttgtactcaaatccatcagcaatagatgcatagtacctgtccaagatagagtctaaagggtcagtgattgtaaatctaccgcacatacaaaacacctcctgtattgtgcttacaaaatataatcatacacttgtgtacggggtaatcttgaattatggagatgtacataataacacctcaacctaattatagcggtttgctataaaggattgaggcggtaagttatggagaatacgacatgtgttgatcagttcatataagttcgttcaaaccattcaacggactctgttagactcgcaattcctaatacgaaaagacctactccaaaaagaaaacagataaatatggaatcacctaatccgttcattttaccgtaatgttcaccacagtacgggcaaataatagcagtgtttgaaatcgaacgtctacatgttgtacaaggcgtcattctgtctatttttacaccttttaatcttctataaatattgataaagctcttaataataaacataattgataatacaaaaagtgataatgttaaagcacctaaacaaaacacaccaaagtagtcactaatttcgttaatctttttactcatagaacagttaacccctcattcaagtttaaactcttttaatgggtagcagcatccggaattcttccaactggttgtttacctagctaccagcaccacgattttctgatggacttatgtattggatatctacaccttctcagccattcaaagctcgacctaaatttaattattcggcaactccttaaaatactccttcaactgacgctcaacgtgtattggcgcttgatttaccactcccttactttgtacgtttctccagaagtggttaccggttttgtacagcggtcttttgaagagaactatgcgtaatggttaactaaaccaatcattatcgctatccaataagatcatttggtcctccgaggcgcattatctcagatgcgacaaatttaagtttgagataaacttaaaggataatggtagtgtgcaaaatgaaaggagcagtttgccgttcgcagctgctccacatttcgttgagctagcaacataagttactttaggtgcgtctgtgtagcaaaaggaggaggaacatgaggaaaaaaatatgtattctactagtgctactcatggggtttgcgatcgttgcttgcactaaacctcaagctgagaagctgaccacaatgacattgcaagaactctatccaggggatattgcgaatgtggattccgttgagattacggatggtagctcaggcgagcggaaaatgttctttaaccaaaaacagatcctagagtggattgatcaaataaaagacatgaaattcgagcctaattcgaaccaaggggagagaagtggcttcctgtattcggtatctttgcgggaaggtcacatgagtaagttgggattcactccgaattcgcagggcggacattattacatccacaacgaggaattgacattaaaaattcaaaagttgtttggaaacatggattcccataaatgagaggtgaaggcgtgttacgagtcttgaatcggtgctattttactactatgctatacaaattaagccaagcacccgataaataattatagttacgattaaatcctagaaggatggtacgataatgaaaagtattacacgtatgactgcttgcttggttttagccgcatcactattgggttctacaactgcaatagccgaatccgagatgcaggagcagaatgacaaagatatagccactttgacgtggagaggaattccagcagtagacatgaacgagcactgggccaagcgtctctttcaatggggtatctctgaaaatataattaatggatattcaaattacaaccttaagcctgatcaagtaataacagaggctgaattcctcaagatgttatacagagcaatgggtatggctattccaaatgcaagtgcaaatagcgcatatctacccagtgagagttggacagaaggtctctacagggtggctaaactatacaaccatccgacaacgggagaaaacaactttgcgatgagaatgcagcccattactaaactacgtgctgcagaaattatcagtgcaactcaaggcgttcattatactggccaatatgctgttgcctatctgatcggacatggattatccaacagtgaagctaattctccagagcagtttgatgaggaaagtacgcttacgagagcagaagcacttcaatggatacgtcagcttgcttttcatggaaaacttaagatcgatgtgagaccaaaagttcctacagatcttagtcttcttcctgatctaatggacataaattctgaagtgattcctgattttagtacggagcccgttactgatgaggattttagtttgtacattcttggcgatgttccagaacttagatttggagactcgaaaaaatcaattgatgaacaattcggagaatctaaaggaaagaatatatttgattctgatacatatccgttattcaccgcacactttaaccagagtggagagttagatggttggagtattgactcatacatggatggttcccctaatacagcttcttcactactcacaaaaaaagggattgtgttgggtgaaagcaccttgtcagatattatagatcgatatgggtcagctggagtgagcggcaaagggatcatagagtatttttataaaaggatgagcgatggcacctatgaggatatttcaatttatgatccgatccaaaatattgaagacgtgtatacgatctcgtttattgtcgatgatgaaacccaagtactctatcatgtaatggtgacctcttttaaggttgctttcggttatacctaaatccttgtgttattaaaatcacggaaaaccaaagaagcagctgatgagtataatcggctgcttctttgattcagctaacaggaagattagcgtaactcaccattatttgttggggtttaagagatggagctcataaagagtgaagagccattgacactcccacccctaaaggggcaagatcactaaagtgattgggattcttagctaagcttaacgtcctcatttcatttctgctttggacagatgctaagattagggtatgccattacccctcctaagacagtgcatatagcaccttaggctgattgactgttaccgccaatcacagttgcgtagcgaatattcatcgccccaacgatatcacgatgtttcttgaatccacatgggcacttatatcttctatcttgcgccttgttcttttttgaacatgctggacaggtttgacttgaatatgcagggttcacatattccactttgatccctgccatatttgctttgtattcaatgaattgtgccaaacggtagaatgaccaacggtgtagattcttttcgtttttacgacttgttcttgtcgtctgcctaatattcgttagttgctctaagcgaatgacagaagtcttattttcgactgcgaaattaacgatttcacgactgactttgtggtctttgtctttcatccatcgttgttctttatcatctaacttgcgaatagcgttcactttcttttgttttcctagcttttgacgaacactacgaaacttccgtttcttgtatttgttttctcgcccattcccaaagaagcgagcgcgatcatgatctgtgatggctacggcagggattttcagccctaaatcaacgcccaaaatccgcatacccgttttttcagttgttggcatggtgacagcaatttgggctatccacttacctgagcttttcgtgacacggagcgtaccaagtttatgcttcaaaaggtcaacgtttcgatggtctttgtcgatgaacaatgcacgaatttttaaacgcttagattttccctctaccatgaatggaatggaaatgtgcgtgaagtcaagagaatagttttggttattccatacgcaaatcggtttctttaggatcggtatgattgcgtatttacttttcttaactttggtagagaagacactattcgcatctttaatcgcttgattttttactgcacttggtagattagcaggaatgtcttttgttgtcttcttcaaccttttcttttcttctaccatctcggccacgagtgtattaacaactcggatatattcatgactactttgttgcaatagttggatctgctctttagtaggcagcagctttaccttaaccgttagggtctgagacagttacttcacccccttgtcttttgttgttcaacataacgcttgatggtctcacttgatacatttccagcggtagaaacaaaataggaacgtgtccacaaactgggcaaatgcagaaggtgtggaaactcttctcgtagtttttttgatgtgactccttttattttggccatgatatcagcagggcttaatgttggaagtgcattgagaaacatatgtgtatggtctttgtcgcactccatggcaacaatcacaatattaagctctgcacatacctcatgcaccagttccttgaagcgctgttctacctctaatttgagaaatatctttcttctgtatcgtgggcagaacacaaaatgatagttcaacaaagttacggttgtgtttgttcttctatattcattcatatctatattgtatcagtttaatagatgaattgaaacgagctaaaaaattaagaacgcagacatttcggatacttgaagcatcacaatagtgatactccgtatccgacctcacttttatcccacatctaaagaattgggctttctcgttcggggtttctgtaagtatacgaagtgaacacttgtgaagatgtattctaaaggagtcataatagtaattttgtggttattatgattagtgtatcggctaagcctgttctatcccaatttacaaatgctaatgatacgatgaatcaaagccatcgtgatataattaagaaaattcaacgctattactgagatatacatatggagtgcagccaaagatgaataagaatctcaaagatataatttgcaggttaaagataagcttgaaagaagatccaaatgggataatagttggtgagttaaatgaggggatctctggtattgagtttgagtttaattctgttcacctcactcagtacatttcatttctagaaaaaacaaatggtgcacgctgtggggcgattgatttttggacctatgaagaattacctgataatcaatatagggtaagcgaattccctgagtttataaataggtggcttgagataggacaagtagtgtataaaccgctttttatagacaagttttctggttcgttgattctaataaaagatgaggggagattccaagaattcgaaagtttagatacgtttcttttgagttttgttttcggcaagaactatgagttaatagttccgtatgttgaaaaagaagaatggtttcagtttcttataagaaatgagactatgagttttctctagtagccttatgacaagacagcatggctacatacaggtttaaaagtagatatcgtgactaaacgttcaatttttggcggctaaaattacacctcagagtcgagaaaatcaaacaaaaacagttacgggcgaactaagctccgaataattcggaatcatagctccctgtaactgtttttgatgtagagtacttttattgacttggttggagtatttcgatgtctggctccatcagcattttgttcaacaatgggccgtacacattgtaatgtgccaatgaacgtcctggaaaataagcttctagaattttcatcgtatcgtgctctttccctcctgaaatgtagaaatctcgcctaacctgagatattaatccatcattttcagcttcatatatagtaccatccatgctttttgcaaaccagttcgaggcttggaaacttgcataaggtatccctgcttctacaaagagcatatgacttctgcttattggatatgaaggagaaagtacagaatactttacgcccggagaagggtttgagcttgtccatgggttggtatatatcgtattttcgctaatttcgggacctttgccatgtgtgttgtaatatccatctagcgcctctgtatcaaatacattaattcctaattctaaagctttggaaaccgctaatttatatgcttccgtatgtacaacagagttattatttggatcggttatgcctccataaacattggggtaatcaccacgtgcgatattgtcgatactgagtatgaaaagagtattcttcttatctgctgcagtcattttctttgcatagtactctgatcccttattaaattgttcaatatcaaaaaaaacaaattttacggtatacggcaatttaactgcgtgaggagatttcttgtctactagctccttgatttgagcgagcattaatgctacccccgaagcgttattcgaatagcctgatccgtcataatgggcactaacaatgatttgtttgctaggatctttccctttcagtgtgacttcaatattcgagcctttaaaaaatacatgatgtccccacggcgcagaaattacgccagtagtgtctttttgtgtgttgaaattttgctcataaatatatcgagagtctacgccaatttctcttagcgtgctcctaatccatcgttttgtctgtccatgaactttaccatttcccatggaattatctgtaggagaggctgaactatctttaaggtgttcacccatatactccagatatgtttgtgcatttgttgcgatggaagaagagcctgaagccaatgcatttccaggaaccgcaataaccagcagaatagccaatagaataccctgaacctttaaaatatttttcatatttcctcctcaaatcaattcgttcttcaagttctacaaaagccttacaccgtacgttctattcatacttaattaccgttaatttttgagagcggcctcccaaaaacatactctatgtactagcaatgtttagtacctagcttgttactctgataattcacctcacaatttagaaaatgtaattcatcttttcattaaagatatccatctaacactggtaggattaggaatattgtatcacatatcatagttcttaagaatcactgaataactaagaaatggggaggacggtggagaactatattagataggcgatacttgttaagctaacgggcagggtcgtttcggtatgtggtatgatttgattgatggagtaaacgaaaggtgctacatgagtcagcatcggccaacaaaggtgaggataacgattaagggagtgaactatattgaatgtacagcatgcctatttacgacaaattcagctcaaaaggcacgaagtccccacttataatcgttacccctttaacttggcagtcattcgaagcctaaatactcttgatttccaccccaaggtaacctatatcgtaggtgaaaatgggatgggcaaatcaacactgatggagtccatcgctgttgcatggggatttaacccggagggtgggaccatcaacttttccttctcaacccaggctacccactcgagcttatatgaatatatacaattgatcaaaggtccgcgacgcccgagggatggcttcttattccgggcagaaagttattataatttagccacgacgatcgatgaattggacagccagccttcattcggtcgccctattaaagattcgtacggtggcaagtccttgcatgagcaatcgcacggagagtcgttcttttccacgttcattcatcgattcggggagaatggattatatatactggatgagcctgaggctgcattgtctccccttcgccaaatggcgatgctgacacgaatccatgaacttgttttgcaaaactctcaatttgttattgcgacccattccccaatcctcatggcatacccagattcgattatttacaatctaaagccagatggtatcgaggttcaagtattggaagaaaccgaccattttatgatgatgaaagagtttgtgaataacaaggataggatgctcagagaattatttgaagaaggtcaagattaaatccactgctataccatggaaacctacagcctaagagaggtcgctttaaaggaaaagatctattgtgaagattaagcaacaggcagtatagttctagttatgtggtatatttcgaactaaggtatgactcgtcatgcttgaaagactattgtgtttcaggagggtcatttgtatgggaaagacattccgcaagagagctaaaaagataatggtaaatggttatcagtttcactgtgtcattaatgagattcctagtaatacgtttgttaattttaaggtttattcatctaaaacctcatattttgaagtgttatttacatgggaaggtagttggcactttaacccacacaaacctaggaattgcgaacttttaataaggcacgcgaatgaaattggttgggcgtttaaacaagaaaagaactcattgaaaatagaacaaggtgatttacttattagtaagcttggactaactgtatgaatgcttaattcctatttatcgaaacgttaacttaataaaacttaagaaggcaacaccgagatcaactactgttttcaactagcggactgacaatagggatcgttgcggaaatgctcaagatcttttttttgtgtacctttaggaatcgtttaatcgaagttttagatacataaaatccaacttggtttttgcaggtatttaatcgctaagcctatggtgacgataatgaatattgaggagttttctcctaaatcaagagcgccgaatcaaaaggagagagttcatgaaaaaacagtttatcaaaatcgcaggaatcacactgacagcagcgcttatgttaggtacgatgagtatcacaatacctaacgcgcaagccgctaaaactccattttccgacgttcaatcgacccactggggcgccggtgctattactaatggcgtttccaaaggttatgtcgatggatatacgaatggtacctttaaaccagacgccagcgtcacgcgcgctgaattcatgaagatggtcgtctcggccatggagcttgaaaccaccccatccagcggtaaatggtacacggaatacgttgataccgcaagcaaagcaggtcttttcgcaactgacgattttaacgataacgaagcggcttgggcgaaagtgatgacacgcgaagagatggcccgtgttgcagctcgtgcgatcggggaaacaacaaaggaagatgacaaatggatgtatctcgctacgaaagccggtctcattaaaggggtaggtatagggcagatcgctccgaatggactgaccacgcgtgcgcaggcaatcgttgtaatcgaacgtattcttaccaagaataccggcgcttcccttgacgtcgacaggtatgcggtcggtagtgcagaaatcgcatggcatggtaccaacatcttcaccgtgatgccagaaatgtgggttactccggaatccgattggaaacaagccggtaagtcttcggtcgaagaaatgtggaacgaaaagcttatgaccatcacatcgaaagatggactgtaccaagctaaactggacgctcttatcgctatcgacttggctgatcctaacgacccgaaccttggactgattgcgcctatcaatacgcttaagtggtataataaccgcccttcaatcactaatttgatggttaaagaccagaaaaagagttacgtcctttatttcaaaggtgggccggtatttaacaaagatacaaaaaaatataaccctaacacaaaaattcaatttcaagtcgatggatttaatagtcccgatcgggaggcctttttccaaaaaggtgtgctgaatacagttgcacgcgtttatcgcaatagccggacagacaccactgctgtgattatccctaaaacaggaactattcaactaaccgatcttgtaatcagacttcaaacaccagcagctggatcgaacttcagtgaaagcattccgctccgtctcaaaggtatccaataaagaaaaagcactcaacatactgctcctaatgagcgaatgatgggtgttttttttggtttagttatgtatcacaaacaaaggtcccctgcaaattgcagagggtctcttaaatacatttacgtatacacgtaaacatatacgtaatgtatacgtgattaattaagtgaatgtatttagctggttgtgccataggttcagcaaatttttgttgtttcatcacaatttaatgtgtggcgttacgtctcgatctcgttcgtgctgatatgagccatatatggattggaattgatactaaagagtacacgctgaacattaaattggatatcgtcttatactggaaattttgtgcttggatagagttgaaagataaatacataagtattgcctttacgagaacttatttgttatatatttctcggttcctactaattcgtatcattaccgcatgaagacacatcataaaagataaaatggctttagtgaagaggcaatcattccttcacactgccttctagtatttgtatagccaatattgatgttatagctctgtatacatatcacctcttcagattcaaggtcagggcagattagattagtcgtttaagagtacatttcatttcaatcaatcaacaaataccagggcgagcttattacacataaagctaagagatgtagatatagcgggagtattcccgcagttcaccgtccctaaatcccaagcgaccccagataagtcgtctgggttccattggaattcttaacgggactagcaaggaagttaaagacttggggcaatgctcatatatcatgggcatggcttcgctccgtttcacttcacttcacaatacccaccatgtactacgaagcaaataaggaaccatgactccattacgctcgcttcattccttcatcgttccaaaactacctgagtagacctttgattcaaaacctttggttgcatattcgaagaagaaaaaaagtcacgttcgcataccttgcgtggagacttaccctattccgtttttcaaagagatcattcgtattccgtagccatctaaccgcatgggatcatatagaacctctccgggcaaggcgacaaaattatgttgagaaaatcattccacctaattttgtcgtcccttcgggcagccttgccctgcgagaacctatatgatcttaaatctgcgacggctacggtatacgaataatttgtttctttgaaaacttcataaggtaaggcatgtcagctagtaagataactgctcatcaaccttaaaagattccgctcatcgccgctagggctagacaggcaaacggtgccgaatgaggtttagggtaaaaaaagtctgttctaattaaaggatgtataaaggaggaaaactcaacatgggtacggaggcgttacgtattcaaattgaagtgttgcgaaaagagcttattgatttagcccagcagatgggtttaacagcagtggaggtagtggagaaatcgcagaagttggacaacgtactgaatgaatatactagacaacatcaacgaaaaaaataaagcccgtttgtttaggaaaacaaacgagccagggcgaagatttggaccccttcgcaccttgattataccacatacaggagagcttaatacgagggggaattaatgaattaacgataaccgtatggtttatcgtctctctaatgaaatggggagcaatggggacggcgatactttgaagagtggaatgcctagcgattatctatagcctatggataagactgatgagggcggttagttacgcaggtttaaagatgaagagaaggtagtcatataagcagcaggacaggtaaaagaagttgcagtacttaaattaggcatactatttcaagacgcctttacgagtaaatagtacgatctctgtattttctttgtataactattttgatgaagtgccatataacggagtatgcacgtacaatgtacgttgaaaggaaaaacaagtgattcccatgtatacccatagcatgttgagaaatggtagactatataagaacccgttgggggtataggattcggtgtggttgattgaatcgaatctattcaataggaggtttggatgaatggaaactataacagaactttttaagagattggaaaaagaaagagaagaaggattaaagctaaaccctagatacgatattgataaacttgcagatgaaaacgatgaagtacttatctattttcattcaagtaaagagtaccaaatgtacttggatggtaaaagtgtcattggctcaacggagcgttttctcccttcagatatatttcgtaatgtacaaaaagatagaattgagaaactgacagatggaagaactttagcacatattccagctttatccgctaatgatgaagtgtgatcttgtgataaggagtgtccgatgagttcgtattgaatgaacgtgagttaagatgggtgttgagaacgatggagaaaatgagtatgtgaacgtgaactgtagtaaaacaatgatattccaagtatctatatccagcactaaaagctattgaatcaggattctcttgcagattagtcacagatattggggagtatcgcaacagcccgttacaacccgttttgattgggacgaaggaatgttgagcgaaggcgggcaaaacgaagtacatatgaatttgatttcaatcgactaaggagcgggtggatatattaaaaacacattggggcaaatatgtaattctactaaccattattttaccgatctccattgttgctatttttacgctcccttatgataaacgctatatggcagtagctatatttccgttactattctgggtatcgtattattcgtggatcgcattcgagaagagaaagaaagatacatcaaacaaggctttctttaggaagggggaggaatagtgaagatacatcatcgggaagccgtattgagaaccgtttcgggaagcattaaccgcaacttaaatgatgaagcatcagatagggatgtcaaatactttgtgttaccgaacttcaatgatttgtatacaggatctctatataagaactttcaaacttcaacgacagaagatatcgaaattcatgatgttagaaagttagaaaaactactgaccaattcaaatctcaccttcctcgaacttctatattccgtagaagtagatacctttggatatgctgagatcgagcaacttcttaattacagagataggatttcaacaattaacttaaagagtctgttcaatagttgttttggcatgtatagaggacagatgagggatcttaccaaaccaaactctgaaacacagaaaagcatgatcgctcaatatggatataacacgaaaaaggcgatgatgtccttacactttctactcttcttaatccgttttcataagtctgagtttaaggattttaaaggtgcgattacatatgaaggaacggatagagcatatatgcttggattgaagcatggtgagctttcattggatgagtttaaaaagatcacacgtttaaacgaagaaaaagctctgaaattggagcaaagttattatgaagttccgcttgataaggaagcgaattattatctgaagactctcttacaaactcttgtcaagaatcacattaaaacaatgtgaagaaagtctacatttacaaacaataaggagtgccaaggaatgaattttaaccaatgggcttcagagaatatcaacatcattggcgtatttaatattacactcactatcctattgaccgctctcaacgtatggtttgctagaaactctcaacggtacagtgctgaatcattaaagcaaaacgaaagaattcgtcaagaaaataacacgcccaatgttatcggttattttcactcaaacgatcttcagctggtttcatttttgttgaccaataagagtgacaatgcggccaagaatattaagatacatttgaaaccaagaaatggggaagaagttcctaaagatttaataaatgcatatatgcttaatgaaggcgttgcatttttagctccaggtcaaaccgttaacgctttggcaggtagttttatagaaatcatggatgaaaataaaaacttccctatttttgatattcaaattgattatcaagatatagattcaaataattattcaagatcatatgtactagatatgaacatgtataaagggaatttcatgattaaagagagaggactaaaggatatctatgtccagttagatttaatggagaaacatatcagaaaagctgttcgtctctatggaatgcaggacaaaagagaacaagaaaaattgaaaaataagccaagaagaattagaagatgaataaacttgaaatctaacgacacgtagaatatcagcatcagagactagtaattaaaattggaagttctagcgtgctggatgagacaagtttatcggactcaagtttagattatatctttcaaaagggtggaatcagggtggaggactggaggttaagtaaggcagaatacgatatattactttcctacataggctgtggtgatattcttaatgcagatattttagttttcggaaatgaagagggcacgggtggttatacagtaacagaaaatgttaaagccaggacgcggttgattacaacggatgaatcttcggatgtaaggaattattgtattgaggcaaacaactggcgagagggattttattatccaaatctagagggattgtttgaaaaaaacactctaaggattttactaaaggcgtttttaatgcagctattgcaaggctttgtctagctcatgaacgaaacagacaatccaactggtttgaaggttctctaaataccgacgaattttgtgtaatcaaggaatacattggctgcaagctctacaagccaaaaacggagggaattcaaactgctttaattgattggagaccgctccccagatcaacagagagaaaatggtatccaaatgaatatggagcagtagctccatctcctgaagataaaccaaatcaagacaacccttatttagcagcattcaataaaccaaaaggtagattcaagccccaaaaatactccacatcgagttttagtgacttcaaagaagatacgaatttcagagctagaatgatcagaaatgctctaacaaaatctagtgcacaaattctcctcggaattggcggagctgctggctttaagaaagatgctcttgaattaatgtttggaaaaaatctattctcatccatcccattctcttgtgatatgaggaacagtaaggggcaattacaaaaatcctttaaagcagaaatttcattaaacaatagggttttatacattttcttgatacccttcccttctgcaggactcgggttcgtttcacaagagaaagcattagacatgctagcggaattatcggacaaatatcttaaaccaatattaatgaataaaaattaattttcttaattaaatgttatcgtgaagtgatttgcataatagagtagagcatgaaaagaaggagatgattgattataacaactaatcaatatttaaatcgggcctaggaacataatgaatgattgaattcacgatttatttaataaatatccctattgtgtatgtgatgtgtactgtacatacaaaacgatgaagcgaatacttcctgatcgtagagctaacaaattcatatagcgagatgtggtccctataactcgactcatgttggaagtaagtttaattagatgtacagaaccattctatgaataggtcaaactaagtttctaaatgagggtgatagataggtgtatttactaacaagaactgcaaccattgtgacgtggatttttgatcaccttggacttgttgtcgggattttgtttggaatcgtagctttaataggcttacttagtgggattttctcaagccgaacccccatgaatcgctcgcttacccatgaagaacaggaaagaagcatagaccggagtttaggaaagaaagaggcatgggaaggcgagcaaagtagctcatttgtagatacgccagcagtccttttagataaggggcagcagggagaagcgattgtacttgatgctgtcttaaaaagtcatccccatatcaaatgtctttcatctctttatgtaccaacgagcggtggacaatacactgaagtggacttggttgccatccatagtactggaatctatgtaattgaatccaagaactatcggggagtaattgttgggaatgaagatgaacgcatatggaatcaggcgtttattgaggatcgaaatgaattttacaatccaattatgcaaaatgcggggcatattcgagctattaagctttttttgggtgaacgctataaaggcataccgttccattccattatcgtatttaataacgactcaaatatcgatttgatcaaagtaaaatcaaaaggcattgttattacgaaacatatgaatctaacaagccaattacagggtttatttcacatccttcctgatgttttaaatgaggaaagtacgacagtcgtttatgaatctctgctgccacaaacagaggtgtcagaggacataaaaaggaagcacttggaattcgtccaacatcgtaaagatgcgtagtgtaaagttgaatcaacttgaatccagttgcgaaggattcacatgatcggttcgaagatatgaaatattatgcggtgaggaagtatgctttctattgtttggctcgagcgaagctatgttattagctatttggacactggccaggtagaggtgcgaatgccaagctcacatgatttccccgggagattcgcacctcgaaatttgtcgaacacttcagttttgtgaccttttggtaacaaggatattgagtttatatgttgttgtgggatatagtggagctaatatgtggaaaaagtatcggaattacgtatgaaggtattttaaacataacttgatacgtgtatcttcgctgtcgcactccgtatggagtgcgtggattgaaattttcgttatctggcatgccgtctacaatacaagggtcgcactccgtatggagtgcgtggattgaaatccaagcattaggaacagtttgatgatatagagtcgcactccgtatggagtgcgtggattgaaatacccttaatctctgacttgtaccacagactggattgtcgcactccgtatggagtgcgtggattgaaatagcaaggacgctttaatctcgctattacgggcgcggtcgcactccgtatggagtgcgtggattgaaatcgaaattatcgcgagctgtttcgattgagcttccgtcgcactccgtatggagtgcgtggattgaaatttgttcgcgagatagaaccggttggcgtgcgttggtcgcactccgtatggagtgcgtggattgaaatctctgactgtaccagagccttgacgataaattctcgtcgcactccgtatggagtgcgtggattgaaatttctgaatttgagggatagtggtgaggccttgatcgtcgcactccgtatggagtgcgtggattgaaatgacgacacagctgagggtttcggcggcagcgtatcgtcgcactccgtatggagtgcgtggattgaaatcacgatacgcgcgtcaaggtaatgctgagattggagtcgcactccgtatggagtgcgtggattgaattagtttgaatctcagaaaagttatcttgggcgtttttcgcacccctcttgcatatattgaaatcaggagggattaaggaattatttggaattaactctgtattgagactgtggattgatttgatgaggatctaggaagctgaacccagtaatcatgtcgctcttcggatagagttaccttcacccagccggtgggaattaaccaaggagaatagaaatgggaaggtagtcactattaataggtagtgttgttttcgttactttttaccatttagtacagcttcagcagtcaatagtaaagtcaccttgaaatcttacaattataagggacaaccataaacatgagccggttgctagcgtagatcgactgaaggaactggaagcagagctccaagagatgatgcaccggttgtttcaagagaaagagcatacgcttgcggatacacaagaagaactggcgattgtaaaaaaaagcagtgcacatctttagcaaaccaaagagctaagatttcagtttgtggaagaccatcgctccgagtttcctttagatgtgcagaacctttcaagtatcacggagcggatattacaaatggcgaatggcccgaactagcaagcggcagaaccgcaaagacgaggtcatgaagcgtattcggtgtcatttttacgaccatcagatgcggtcggcagccctatattacgtatctgctccatttaaaagagttgcgaatctcttcacttaccgtcagtatatacatgcgtcaaatgaatctaagttctgtggtcatgcccgaatatcgtgtttagactacggattccaaatacgatcatccccttgcgccgaaaacactgaatcagcaatttaaaacgtccaaaccgaatacggtatgggttaccgacatcacctacattccttgccgaggaggtcgtctatgcctcgccagcgttctggatttgtgcacacgtgaaattgtaggctggcgtctgtataatcatatgaaaaccagtttggagatgggtgcattgaaggatgcttacaaggccaaacgtcccgctccggaattactccatcactcggatcacggttctcaatacacgtcaaaagaatacgtggagcaactgaaatcatacggaatggaatcaagtatgagccgccgaggaaattgttatgataacgcctgtattgagtcgtggcacagtattgtaaagaaggaactcatttactgcaaccctcgttttaagacgccggaagaggcctataccgtcatctaccagtaaaatgagttctactacaatcgcaagcgaatgcatggtttgctagagtaactttcccaattcgctttgcgatgaattttacggacaaatccgcagcatagtgtctacttttttgacataggtccaaaatacatgataatagataagcatttcaaaaattcaagtgaaaagaggttatcttagagaaaattattatatacgcagattaaataatactaaagttagagaatggggttatgcaatttgagtaaacaatttcttttttggaataaaatcaatgttattttgatagtttttttgagttgcgtgttgtctgaggatacttctctgtttgctgcagaatctaaaaatgaccaaataataaagaaaatatctatagggaacaatcatcttcttatgctagatgaggaaggttcgatttggtcagctggtagtggcatgtttggcgagttctctccaatgatgaataaagtagtagagaataatccattagcaacaaatataatggcgatttctgcaggagaagtccatagtctagcgttaacatcagaaggatcaattttagagtggggttacgattctagaccaactcaaataatatccaatttgaagaaagtagtggatatagcagcaggatatgagatgaatttagcattggctgaaaatggagatctttggagttgggggacctttagtaatatagaacctcttggccaactggcatctgtaaaacttgctgacgtggttgacatagcagtaaacacagatgctgcttatgctgtaaggaaagatggaactttgtgggcatggggcgatgataacagttcttatcaactgggttcaagagatatagatccttatacaagtaatatccctcgtaaaattagtatcccgaaaggaattactaaagtctttgcaggtaagggctacgctatggctatagatatcgatcaaaatgtatgggcatggggaaggaatgatttcgggcaactgggcgatggtacgctcattgaccagtacattcctcaaaaagtaaaaagtctaaattcgataacacaacttgcactcggagatacttacgttctcgctttagaagatagtggtactgtattatcttggggagataatacgtatggcactttaggcgatggtacgactactgatcagttaaagcccacaatactttcagggctgtccaatattaaatatattgaagcaggaaatagtactagcatggcagttagtaactcaaatcaagcttatatttggggtaataacctactggaacggtttcctaaagctctggaaaaaccgaaacttatagaggttactgtacttaaagggaaagaggaatcaatagaagcacctactggattgaatttaaaagctttatccagctcctctgtaagacttatgtggaataaacctaaaacacctagtactggtttaggtggattcattgtttatcagaacgggttgaaaatagctgagactaacgatgagacctttattattaaagggttaaatcctaatgaagaatataaatttatagttaaagctactaacagtaacaagaagaaattttcgaaaaatagtgaaactgtgactaagaagcctgtaaaaaaagaaaagtctagttatgtttataattcttccggccaattaaaaagtatcatgtatgaatcagggaagatagtaaactatgaatatgataaaaacggaaatcttaagaaaacaacggttgtgaatccttaaccctattagacttcttaaataacttattacttcataaattaagactattattttacctgcacccttgcgaataaagtgttattcgtaagggtgctttttattaatctgctaattcaaatttcgtgagtcttctattcatagttctttgtataggtaacagcgagataagtgaagctagtttttggtagcgcaaaagattgcttattatacatatataaactttaacaaaagtacactggtaataaatcgacaaaaatatctataattcgacaaaaaaagcctatttcttaaaattgccaaataaacgataataggaaagctgtttttgaaaaccgacaaaactaaatgttaaagagagggtggaaagtacagaatgatcaagatttagttgatatacaagatggatttccaattatcgcacaggcaaaaatgtacacgaaggggaaacatgcatatgaagttacggggaatatcgattattgtgctaattctaatacttagtattgggattttcacaaatgaaaaagtggatgcagctgagaaaaagaagctaaacgaaataaataaagtctcagttgggacccaacatctctttttactaggtagagatggttcaatatggtcagccggtatgaaccttcctggtttgctggggcgttcgggaaatgcatttgatggcatcggagtgatctcatctgcctcgaacgttgttgatatttctgccggaggttttcgaagtttagctttgacctctgatggaacgttactttcttggccaggaactacagatgttgagatcccagatctgattacctcagtgaaaaacataaaggcaatagcaacaggttcaaactttagtgtattactcactaacgatggtggggtttggacatggggctcaaattcttcaggcgaactggggttgggtgatactcaatcacgtaccgtaccaactcagataccaaattttaaaagtgttgttgaaatagccgcaagctattcgacaacgtacgctttgaagagtgacggctcggtatggggttggggcacaaatgccactgatcaacttggaaatgagacaatggattattccctcaatccgatagagattaaatttgctaccaaagtaaagcatatctatcaaaaggcagggtatggggcagcaattgatataaatggcgatgtgtggtcatggggtactaattcttttgggcaactgggagatggaacacaaacaaaaaaaataacaccgtccaagattgaaggattacagggaataaaggaactagctttaggtaccagtcatgtacttgctttgaaggaagatggcactgtaatctcgtggggggctaataccagaggtaaattaggtgatgggacaacgactaatagcctggtgccggttaatgtgaagggtttaacgaacattgtctccatctctgctggcgcaaataccagcgcagccatcagtaattcctctaaaatttacttgtggggaatggatgtaacgagcaatggaacaacgacatctatgcccagacgcatattggtcgatgattattcattggaagtccccaagggattgaaattaaaactcaccaatccctcttctgtgcatttaaaatgggcatccctcactgcagatgatgatagcctagatggttttaatatttatcacaatggtgtcttaattgggaacacgcatgagagagaatatgtcataaataacctcaatccagatcaagagcatcgtttttatattacgactagaggattgttaggtaatgagtctgaacaaagtagcgttgtagttaagaagaagaaacaaaaatacagttttacttacaattcggcaggtcaattgataagcattatatatgattccgggaagaagatagtttatgagtacgacaaaaatggaaatttaaaaaaattaaatatcattaatccactcactccctaacagattaacgttcaactgattgacagagtctgttcttctcactagtaactgttgaagatactcttacaaattccataatgacgtttgacaattagtcatctcagagagtagctattaactctcaaatggacagaaggatgcatgagtacgcctaactattcattccaagcttgctacttttatgtttacacgttcaaccaacatatagctattatttaatttgaaacggagagaaacaacttttgaattattttatgaagaaaacaatatccatcattttaatcgtagccgtgctgtcaggattgatgggaaacgccttacctacgaaatcatatgctcaagatgaagctccttcacccgaaacgatccaaatcctcattgatgaattcggtaccacggattcattcatccagcgttatttggatcaaggatacaatttgaatgaaataatagctgcattttacaaagccagagaaagcgcaatgtccttcgatgaggcgcttcgggcaattcaccctgaggaggtcaacgaatcagctaccgtaaccagtgatgtatatgctgaccctactattgaaaatgaggcttcaattatcagtgtcgaagctgaacaatctggaattatgaagcgttatgaaacttatgcggtgactgaggaggtctactctaatttaccgacagatccaatcacggagaccgatgacgaggaagagtcgaacgtgaaaaaggaagagccctcggaacaaacacctgatgagtccgtgcctgtccaggaagagaaagaacttgaagacgaacaagttgatgcaaatgacaaagacaaccaagagttagaaacaactcctgattcggtttctacggaaaacaaagaggaggcaacaacggaagaaagcgattcaaaagaattgaaatccattcagccgcttgctgcctcaacaagtgtccctgacccagggaagcatgtgtcagagaaagcacccgtatttgatcgaaaatcgtttaatgaagcgccatatagtgtgggtgaaaatggcgaaaccatctctacactcagtgggggacttattctcgaacatgccgatgccactttacctggacgaggaggcatgtcgtttaccctcgaacggcagtataactcaacctcagcacaattctatgatatggacgtaggctataatacgtacgaatatccaatatatcaatactttgtaacgtataatgcagtgaagaaaaagaaaattcctaaatatcacgttaagtatacggaaaatatgtcgattcagtgggataacaatggggatggagtagtcgattccgaaacggcaatcattgaaacgaaaacgatgaagaagggaacctacacaactgaatccgaagccaaagaagtggctagtcatcgaatcgtgtactttaccgagcctgaaccactttttgtacagaagactcaatacaacaatcaagataactttcctaccactatggcctataacgagggtggattcattggaacattaaacaaatctggaagcgcaaaagttatctctggacaatacacaccagctcagacaatcacagcaccgcaacagacatgtatcaatgaaatttcgggaaaatatgactctaaaggaaattgggtacaaactggagctgggagtccatgtccagataccaaaacagcgacggtacagggtaaaaccataacattgacccgtacttccgtgacaaatacaaaggcctgtctttcacccaataaagcgggggctaattatccgtgtaccaagtcttggacagcctattacaatggatctgtgacaattccggcttcggatacacgtagttattcgcaatcttatgcaggcacagtagaaaaacctggatcctactcctcacggaaatatgattcctgggtaagtctggggaacggtgcgaaacaacgtaaagtatacaacgtgagtgaaaaaccttgggtggaaactgaaatcacggagggaagcgcagtcgcaaccacgctagctacagatgccactgaattatggtctgaagctaatacttggaaagaaacatttaatgcaaatcccggatatcctataccctatccgtttgacgatggttataactactatatcgctgcacaacctgctggggaaactcgcgcatatcaagtaggaagcaacatggatgtaacctactttaacaaaacggtgcctgcagcagcggacaagcgtacgccgctaggaaaaggttggtcttggaaactaccatatattgaaaaggataacgagaaatcatttgtggtaatggccgatggtggccgatatgaaattgttggcagcaagcttaagggtgcggattgggaaggtaccagcgtaacccaggacacgtcggtaactgtcaatggagaaacatcgcaacaagttatcatttcggccgatggactctcaaaacaatacttcaccgccgacggacgcttacttcaactttccgattcccggcagaacgacattcaattcatttatgaacaaaatgcaacctatcagagtaaattactaactcaggtcaaggatgccattggaaatacgatccggattgattactcaccttcggccgtgacgattcggcaaggagatcgtaccgttacgtatcaaaagaaaacccagaatgggattgaattactggattcagtcatcgacccgctaggtcgaaaaacgacctattcctataaactagcagatgcgaagtttaacttgcttggctttagcccagaacgcgcggtatccaatccatacgctttgctgacctccgttcagcatcaaactggagcaaagaccttctatgaatacgagaactctgcagtgaaacgctatatcggagctgactcactgaacgaagcataccgcgtactaacacgtaaggatcagttaacctatgaaaatggcacaactgaagattacaaccgccaaacagtaagctatacttcagacctgggagcaagttatgggcagaaggctacatttggggctaccatccgtgatggactgagagagacgaaatataatttccgtaaagaggtcattaacgcagatacgccaacttctttctatctcgaccagatggtcgttagcgccgaagggcagaaccttacaacagcttatacgtatggaaaagtattgaaaggccggagcattccagcaaccgaaccgactacagtggctgtaacggataatcagacaaaggacaccttgactacaaccatacagtatgacgattatggcaacgtaacttctcaaacagatgctagtggaaaaaccgttaccagcacatatgatgaaactcggcactggctaaccagcataaccgaagcagtagatgccgccaataaacaggttgctgttctcacacgcaacacaaatggagatatcactcaaattgtcatccgtaaaaatagtgccagtggtgaccttatcagtcaggctgattacacgtatgacacatttagcaacctgcttacacagcgattgaagaacggcgctcaggaacaagtaacgacattggagtttaacgcactctatcaacaagcttttccgatgaaaacgagtacatcagtaacagatgttgacggaaaaaaaagcaccgtggtgacttctagaacctaccaaccttctaatgggaccttaatgagttcaacggatgcatcccagcggacgacatcatacggatatgatgcgcttggacgaactattcgggttactcagacggatggcagtgtcctgagtgcttcttatgatgatgtgggaaaccgaattacagtaaccgatgaaaacggacagaaacggataacaaagtggaattcgctcggccaggaaattgaatccggttattaccagggtggaatctatgtggtcgtttcacgtacgggatatgatccgtacggacgtgctatttggagtgaaaatggtctgggcaatcggacacatttggaatatgatgcatggaatcgagttgtatcaacaacaggcgcggatggttcaataacaacagtgaaattcaatgattcagcccgaacagcgacaacgactgacgctgaaggatatacacaagttcaaacctccgatcggtggagacaaataattcaagtcgcagagaaggcacaacaagaaaatgaacttcgagtgcttaaaaagatgacgcatgatccgataaacggtaatttgctggaagaaacggatggcaaaggccaggttacggagtacagttatgacgtccagggacagttaactgtggttaaaagtgcgaacggtgaacaaacacgctacgcttatgacatgctgggcaatctcgtgcaaacgactgatgcagctgggaatgtaaaacaaagtcgttatgatgagctggggcgtcgaattcaaacaaccgacaagcaggggaataccacaaaaagttattataatccagacggttccttaagcaaattcattgatcgaaacggcaatgcttttcttttcaattatgatgtacggggcaatttgcttgctaagagtagccctgaagaaacgatccaattcactttcgatcgagtgggtaatcgtaccagcatgatcgatcaaacgggaactacgtcatatgaatatgacactgcaacagaacagttaaagcaaatgacctatccagatggtaagcaaacgacgtttgaatatgatagctttggtaaccgcacatccatgaccggtccgtttggaacgaaagtgtactatggatatgatacgatgaaccgtcttgtttcagtaggtacgtcacaggatactccggataagcagtacagttactacatgaacggtttaagccgcgaagctagcgcaaagaacggggttcaggatcttaaaacgtatcagggcttggatctgattggctcgaatcaggtaaaggatcaagttctactgaacagctattcctatgaatacgataacaataaaaatattgtgaatcggatacatggtgattcaatcgatacattctcatatgacaagctcgacagaattttgacatctaatgtaaatcaagaagagtatacctatgatcaacaggggaatcgtttaacattatctagtgatgcggaaatcgatgttaaagacagtacctatacgtatgatatgagagaccgcctgatttccgtgaataagaagggtactcaggtaaactacaagtacaatggtgacaacttgctggtggaacgtacggagaatggtatcatcactcgttattattatgatgataacgcacagatcattgccgaagctgaagttcaagacggtacgtcaacgctaaaagcgaactatatcaggggagctcagttggaagctatccagtatccagatggtagcaaagcctatgtacagtctaatgcacatggggataccaccgaactacgagatgagcaaggggaaattttgaaccaatatgagtatgatatttggggtaacatcctgaccaaggaagaaacggttcacaatccattccgatatgctggcgagttgtgggatgatacaacagaacttcaatatttgcgagcacgctggtacgatccggcaatgggacgattcattaacgaagattctttcgagggtgaattaagtgacccgctgagtcaaaacttatatgcttacgtgagcaacaatcccttaaaatatgttgatccgagtgggcatataaaaaattcaacgtactacgagattgatcttatgttaagagactctatgtcgtttaaaagtaagtcagatgcttactggagtaatcgtagtcaacttggggtaatcttccaaaaggtttatggcgatcgtgataatatgacgttcaaatttcgatatggagttttaactcaaaccagtccttactctcaatttaatacaaaaggaggagcagattgggcacgaaaagccctattggcagatctggatgcttttactgatcgtacttggactacggcgaagtctgttgaagctatacttgatagcgccgttggcctaacaggagcggcaataactaaagggaaaggctcatctattacgtcgaaagggtgtaattgtttcacagctggtactaaggtacagactgacaaaggtgagaaaaatattgaagacattgaggtcggagataaggttctttctaaaaatgagaataatcctactggaaatacagcatacaaggaagtaacaggcttattccgtaaccagcgtgatgatattattaaactgtatgttggtgaacaggttattgaaacgacagacaatcatccgttctgggttgaaggtaaagggtggctgttcgctgacgaactgttatcgggtgataaacttcaaaaggctgatggaagcaatctaaaaattgatagggttgagtatactaaacttgatgaaccagttacggtttacaactttactgttgctgattatcacacatattatgtaacggatttgggtatatgggtgcataatacaggttgtgagtttgtggatgttagtaaatacaagaaatggacaagtgtagggaatcaaaagaaatggttaaaagggaataatttcaaagaaggtactcaatatacaaccgatataatgaagactgatgtgacaagcaacggtaaaaaaattggagagattcattacttccaaagggatgttattaatccagacaaatatgttccaacacattttcaatttattgaccctaagactggaaaaactaaatcggatcatttttatttcgaatgaataggatgatgaacttggaaataaatcttaaacagacgtatggtatgattaagcataaattgtcgtcagaggaaattgcagacttactgagtttttttgttataggagattcgatgatattattttccttttacgaaaggaatataaatctatttgatttgagcacacagaagtttattttagagagaagtatttttgtgaattcggaatgggtattaccctggggggaatctatacctcattgggatggaccaaatcagacaccaccggcaatcatatggttctccgcatcaacaaaagaggatatgattaaagcgattgaaattgataatttatttagatgtgttgttattaagcgaagcgaaagtttcggagaatattcaaacgtactatttcatcaggaatattattcgtccattgatgaagaagaagactacgattattatttaggtttcacaaataaggatttattttttgaggatactctggataagattaagaaggtatttaaggcatcattaatagaataacaaatttaaaggccttggagatattatgtcttcaaggtctttagtattgtgttcattgtataaatgaacacaaaggaggatttattgtctaaagtccggttatctgaaatactagtgtccttctcgcaaatcgtaagaaaagaatatgctgtgaatgtgaatgtaaaattactaaatgtctaaacaattctaacgttcttttttatgagataattacttctcttgaggatgggaatacgactgacttttttgtaaatgggcatttaaagacaaactatataatgcttgggataataatatggagtggccagatagaagagataaccaggatattgtttttggttttggagataatttcgaaattccaaacacagcattttatattacaaaaaatgatgattagattgagagtgctaaccatataaaccgaaaatattttggtatgattcttgactgaagataaaagagttgtacgtagtataaaccaaaagagcagatgttaagccgttggtggcttagatgtaccaggataattaatggtcaacgaatacaacaattatcttcttatttttttcataactacagaagatgatgaaaacctcctgaattagatggagatgattcttatcagatgttttatacttagatgaagagatacgagtagtgtttggaactctttatcaaattgtgctgtttagccatggaagattcttctgattttcatgacaaatgcttttgcttataagagaaaagtaggtttgcattatctatttgttacaacatataaaggctggtaaacttaataacaccgagtatgtagaaaggcttttggatctggcctatagaattggttcagattgttgaataggataaagtgttatgtggcgggtgcgaacctcaagctcacatgatttccctgggagattcgcacctcgagtttgtcgaaagtatctttttcgtgaccttttggcaacgataatttagaatggatgctgattttcttaattgaatgttgatcttattgagaaagaaagcggaaatacgtagtaatggtctagaaatgaagtcttgatacgtcttttttcgctgtcgtactctgtatggagtgcgtggattgaaatttgaagattccgatgagttagacagtatgtaacccgtcgtactctgtatggagtgcgtggattgaaatatagacaaccccgttatatgggggaattaccatcgtcgcactccgtatggagtataacaataagaaagatggcacctccataagtgcctcagaaaacactttaaagaaaagaactgattatgagtctgcccaggttgaacgcgataaagaaaatggggaaataacagtaactgtcacaagactatcctacatacctattgcagtttagaaagcgtatgtcaaaatggccttaactctaatggataaagaagattttaaacatttttctaaaacagtagattggataaaacaaagtgatcacacaataaatacgtggttcacaagtctatgcgtcttaactaaaaccgtacctgggctacatgtgtttccttactcccaaatagacatattgtttagacttccagatgcgcctactgatatgccctatgctttattaattctttgcacagggaaccaagtgatccagcttatagttcctcacagtgatatggaagaaggatttaaaagatatgtaacagaagttaaacgacagttccttatacctcatccaaaactgttagataaaataaaagcttattaattggtctggtcatgaaattgttcgtgatgaaacgtttcagcaaactatagcgtccgaccaaattaaagatgaagtgttaatagagggatttaatgaagtaacaggagaatgggatgttgtatttaaatatgatccatgaattcaatagagtttatatgttgtataccattctgaagtctacagtgtttggaggaacctcatgttttatttcggatggatggctattggctttatggccatagcaggactcgcaacggcaatacactggtacaatcgtggttggtatgaaagcaatttgttgaacatccgtaaaacgtcctatgccattatggcacttatttattttgggatgattttagccggtcacattctattaaatgattgggtgcaagccgtacaattcgccagtatagctatctttattgacctggctattttagaaacgccaagtattcaaaagatcggaaatactgaattcaaaaaaaatgatcaaattatcgaaaacacaatacgggataatgaacggatcattctctctagttttcagaaaacagctcagtttactgcagttgttcaatactcacaacatcatctaaccgagctcacagatgagcagaaggatcagttgccagagtgggatgtgtactcgtctatgttaaaagagtatcttcgatattacacggataccttcggcttacagatctctactacatcgattcaattcgacagcgacatagaaatacgcatgactaaaataaggagttctctctctcagattgaaagaagcaacagtatcctgatccctgaagagaacaaagatgagatgagtaaagaattagcagaagcagcagtttacgtagtagaggaaggaaatacgatttgtgtacctttcttcggatctaccaatagtttcattatcactattcaagcagaggaatctggagccatattgaatgggattgatgctaataatattgttaatctagtccagatatttgattggttcatagatgggtagtgtggtatattaagtatatgaggtgatatttatgacactttttaaacagtctaaaaaagttgatgtaaccccggataaggttgttgttcgtcggcctaagaccacgattgagaagaatatgggcctagaaaaaatcttgaaagcaaacgataacgtgctgaatatccttaaaaatagataattactatttatgtgctccaagatgctctatgaaatttcatagagcattttttttatttcttcttctgatagtttaaaagtctacaataatgccaacccttgttaacaaaacgataggggagctggcttattgtgagaaaaaaaacacttataaaacctgcaggtaatcataaacctaacaccacagtgcccaactggggaattaaaaagatattagaccaaaataaaaaagtattggatctcctcaagaaacgaaaatgagaaacttgtaggacggagggtatagttcatccttgatccagtggtagtaatgaattgcgaaatgccatgaagtcagctgaagcaggtgcgaacccgaagcttacatgaattcccagggagattcgcacctcgaaatttgtcgaaatcttcagttttataaccttttggcaacaaggatattgagtttatatgctgttgtgggatatagtagtggagctaatatgtggaaaaagtatcggaaatacgtatttaggtattctaagcataacttaatacgtgtatttccgctgtcgcactccgtatggagtgcgtggattgaaatcacctctaaaagcttttcgggcatagatttaccctgtcgcactccgtatggagtgcgtggattgaaatgtaaatcactttgtcattatcgaaaaagcgtataggtcgcactccgtatggagtgcctggattgaaatataattgattctctaacaagatcgtaattctcagtcgcactccgtatggagtgcgtggattgaaattaagtccagtatagccgaatagagttgccttacaaagttgcaatctatatggagcatgaattgaaattcttggctttatgccgttctttccgatagtagcgtgtcgcactctgtatgaagtgcgtggattgaaatccatctattgttgttacaaagtctgtcgctgccgtcgcactccgtatagagtgcgtggattgaaatttcttgtagtatttgaagtccttaagaagtatgtaggtcgcaatctgtatggagtagatgaagtgaaataaccatatgccgtagcgacagtttgtgctctagcttccttcgaataattgctgataccgaactgtacactcctgcaactagtgttaataattggtaccttgtggtctactatgtacaagggaaggttttaaacatgagtaactaagtttcttttcctgccaaaaaaagttgttgacggccaaacttgtctgaacgaaagagtacaatatagattgtgcgtgattttgaacgagtacatgaatcgtactccggaaacgcaaacgaaaatagatcgagcaatgctgaaggactcatgcaaggagcatctagcagttctccacaacgaagtggaaaacttttaacgtggagatgtatcccggaccgaaataccgaaaccgcaacacgcggttttcactccagaatcaggatttaattggcgaggtagacacatggttgtgacgatgcagcgtgatcaggggcatcccgatttgaagccttgcagtgttcttttcgttacgattatatctgtgaccgattacgtggaaaaggcactgaaggaacattcgaccgtcttatattccaattagcaagaaaagagcatccttttctggatcaagacagctatataggagcgggcagatcatgccactttatcaggaatggctggatcagctcataagaagattatcaagtaatacatggaggatgtgaatcttcttcaggttgtgaccaatctggtttgatggactttgttgttgaattgaatgaatcgatctctggtgaccttatagctcagtcagaagcagccgcagcaagcggcaaattgaagcacttggtaagctttcaatgcttcccaggtgcttttttattggtcgaaaatcgatcttttcagtcgatttaatcacccgaaacggagtgcgccgctatttaggaccatcttgagactaatattcagtgggcatctggaggcttgctccgtcaaaaggataagataaaattcataacaactaggggatattggtctgcacataatcatttaaaaaccggcgtttagctagcctctgtactttgttctaatagtcgaacacgctaaccaagtaaattcaattgtaattcggatggctggggaaaataaaaaagatactcgtcgtagtatctgtatactggtatattttcccgaattggatttttgatggggggtcatctgccaatgaatgtgattgaagaacttcactctctaacaagttatttcactctaataaacacatttatggcaaagtgtctattcctatatcctaactagttgtcaggaaagataatcctaacaaatatgcggcagggaatcttaatactcttatataaaagagtttttcagagaattgcagcataaaagagtcttataaataaaggttctttttactgaatatattccaagaggtcaccaggtgtaacattaagtcctttacatagtgcaccaagagtttcgtaatcaatacgcttagttgcgttgcctttcagggaagtaatagtatttcgacttacaccagtcagttctacaacgtctttattttgtaatccacgttctttcatgatgtcgccaagtcgacaacggataagtaattcgttcatggtaatgcctccattgaaaaaatataatgcacaacatgttgacatatagtcaagaagatactatgatgagtgtaatgaatgctagtcaacatgttgacattttgaaattaatccgattattatgccaatcctagcaaaaggggctgtctttagcaactacaaataatctaattaaagagtgtaattgattgtgaaaagctaaagtattcgcaatgtacctcgattacaggaattgagtacaaataggaggataatgcagtgatcctacatattgatgctttttattcgtataacaacgtgtttatgaattatgaatcggggcttatttcagattgtagttcttataaggtagggaagcaatgagaccatcaaaaaaattaaaacttgcttcgttgatacttggctctattgatgatgatgagaattttagcttatttcaaggatacgttatgaatgaaagttatttcatctttcttgacgaaggtgcgttatggttgcgccatgtgtacaaggtcgatcgcgtagggaatatatacatcaatggagatgctggagggataattctcgccgagcaaactcaaggagatgccagggtattgattgaatccattgtggatcaattgtctgaaatggatgcgttgacctttcttacggatgtcctgttatggactccagaacgtgttgatatgaatttaagacttgatcgtttccaataagagtgcgaatgtgaagctcacataaaattcctgggagattcgcacctcgaaatttgtcgaaaacttcagttttatgaccttttggcaacaaggatattgagtttatatgctgttgtgggatatagtggagctaatatgtgaagaaagtattggaaatacgtattaaggtattctaaacataacttgatacgtgtaattccgctgtcgcactccgtatggagagcgtggattgaaatagtgcaccctcgcgccagtccgaagcagcttcggtcgcactccgtatggagagcgtggattgaaatatgccgcgcgccatacctaccatctcctctacaacgtcgcactccgtatggagagcgtggattgaaatacagttgtcggtcaattttaccgcggagcaggaaggtcgcactccgtatggagagcgtggattgaaataaccaaaaacagaagaagaaaaggaggaagcattaggtcgcactccgtatggagagcgtggattgaaatctccggccataattagcgcaccacccttgatttaagtcgcatttcttatggagtgcatggattgaaatcagcaagtgttgaaggctatccagccctctgcatagtcgcaatccatacggagtgcgtggattaaaatccgtatctaggaaagtatctttagtgaaattttgacgtcctccatatgtagtgcttcgggttaattacaaacggcttgccgttagttttgtaatctttgatctacatcagaattggagcatcgtatgaatagacaagcacctattttttcactggaatacctcccgttacttattcgacttgaaatggaaacgacacgtttgcccgcatttctcggctctacgctccatggtgtgactggttgggcgctaactcgccattcggaatcttatacgtatgtattcgataatagccgattggatggagctgcacaggatatcgtcaacccttatatcattgagctacctcggccagagccggtttattataaaggtgatacgttatgcttcaagctcatcttgatcggagatgcggttcgttacgccaaggatatcgcgacgtcgttgacccaggcacagacatttggaattggagccgaacgtaaggcattcgaactaacagacatttttcatgcagatcagtacggactcatttggaaacggggtcaattcgagatgaacgcagctacacccgagaatatttctgtccatgcgctgcaagaacaggcttcatgggctctgtacatctgttgacccctgttcggatacgtcgaggtggagcgctggtacagacaattgattttcccacgatcattcggagcattacgaaaagaattcagttattgacggaacgttatggaggaaatataaacacggatgtcgcgatgaaggtatgtgaattggcaagtgagatgagcctgacgtcttccggattatatctgaatgagatgcatcgatactgtagtcggaaaaaagaatcggtggattggagcggcatgctgggttcactaacgtttgagggggaactgtctccctttatcccttggcttaacgctgcccgcatattacatatcggaaggaactccacttttggttgtggacagatcgatgtggtctacagattcatgtaatgtgaaggcgttttgtccatgtaaacaggattttgatgtgggtgagtagtatatgggctttgaatcctgttggacggagggtatagttcatccttgatccagtggtagtaatgaattgcgaaatgtcatgaagtcatctgaagcaggtgcgaaccccaagctcacatgatttccctgggagattcgcacctcgaaatttgtcgaaagcttcagttttatgaccttttggcaacagggatattgagtttatatggtgttgtgggatatagtggagctaatatgtggaaaaagtatcggaaatacgtattaaggaattctaaacataacttaatacgtgtatttccgctgtcgcactccgtatggagtgcgtggattgaaataactctcacatggataaagctgacgtttacgtcgtcgcactccgtatggagtgcgtggattgaaattccaccaaaggatgctgagttattaccaaatacaatgtcgtactccgtatggagtgcgtggattgaaatatctggagtcaattcaacataaatagattgatccggtcaaactccgtatggaatgtatggattgaaattctccaagtatgcttctgacaaagcgctgttctcataatagtctctgaaattgtattgtaccaatctgaaatatgacatatctaacccctttggtatttattaagtaccaaaggggtagaatactttctttagtttttagtaactcttttcttatagttaaacaaaaaaagagagagcattttcgctctctcctataggataatctctgcataacgttaaaacattttctaaatcttccttatgtagtttcccgataaaacctcttggaacaataattccattttctcttacgggatcttgtttaacttctgactgacttatgaatcgttgttggtttggacgttctgacctgagaaggactttttagtccggcttgttgccaatatttaatgtcaacatcaaactcatttctcgcgtccgtccttgttacaaaggtaatgatcattaccaacaatcaatattggtcttgggacatttttattctcctgtgactccagatcgatgcaacccacaaacttcactgtttgatcaggttttcaggctcataactttttcaaatgtagtccctgaactcctcatcatattcgttattttccccttcgaatagaaagtcataagcagaaccaagtaatactcccatatcctcagttccttgatctgtagttccgaaatctttttcgttatctgcggcgataatggagcgatttttcgtcataacgcacactccttacttcgtatattctctcagaagatactgctatttactaaatattatagcatcatatttaaatggatcaacttgtcaatgatgcatcaagcaaacgattatctcaaataaaaatcagggtaatcgtataattattttatattatgattaccccgattatcattatttatttacctttttcaaagaaatttctaattgcttctagatttatacccgtcacacgttcaacctctttgctcacatcgtcaattaaaatcaaagtcggtgtacttcgaacacccagatcattggcaagagcaaacgccttcaaccctagcaagctctctaaatcattaaagtctgtgtcagttgttcaacagacactacatatgaacctgttctgttaaagaaatcttgagtcttagttgctgtatcaataccattcattacaattggattcacatttacttcttcgaagtaagcttctcttactaagttaaacaaagccttattgacattatatttcagaaactccataacatcgtcttcagacttcctcgtaaagcatttgagtgaacttcacttccagttcgaatatcttgtctaacacacgatacatttccacgtcaacgtaatcttgatctgcttgattcatcaactcatattcttctttcgctttgaatccaataaacgctccacgatttgcttcaactttcaagattgctgtgataatattggcgctgatttgcattcgtttaataccagcaagatacaaaggacagtggaagccagagtaaaaactaaataactccgaaataccgaatgaactttttccatatacttttcactagagtcggtcttggtttagtctagggtgaccggagaatagacgagctgcttgcccaaagaattgcataacccaaggaggctacgttaccccattgttcatgacattttacgtgggtaagaatgagtttacccagacaataatgcaatcacagctaacatcttaaaaaaatgaaagaagcgtttttcagaagtacataatgttttattaggccttgatttacgtgtactatcgattaccttcactcccaaacctctcctatgtaatgaagcaactcttttttgtggacctccgacgtgaggtcatatcattttcggtatcaaaatcagtattagatattcgtaactgaggtaatggcccatgtaggtgctctttgcaacctacataggtctttgttgtcttgttcacaattgaacgtggtacttataaaagtgaagatcagcttgccctataaatgaggcaagccctagctcatagaagcaaagaataattagataggtgtattaagtaggaatgcgtcccagatcatctgggctagtatgaacttcatcaaaactacttattcttgcattaaattgttggaatagagcagtcatgactggcctatgtagaattgaaatgttgaacgaacaacctattatcacatattgaagggagtaaataattggccatctatgacctttaagtttggtaagtcaaaagcctaaagattctgcaagtagcagtaaatctttgagctttttttgtatccccaaaaatagaacggaacagtatcaggagaaactctccagtgctctttggtgttcaagcgaaaaattaataaatgagtaatactgattcgaggggaattccggcaagcaggtatcttttcttgaaagataaagtgcgggccaactacagaccggggaaagagagaatatatcggggtcgaagcaaaatagggtaatactatcataaagacagcttacatggaaaaattgaagtttatgatcgtctgggtaatcatattggtgttttaactcccgattgaaatttacatccagtgagaggagaagcgatatctgataggaatattaaagatgaactgaaataaatactgaggtaatacctccataccggtgggagaagcactatattgggtgaatttctaacggatttcgggggttacttaataccaaaacgatgttgatttcaagtacctagtgtatagtataaatttaaaagtaatgtgtaagtgaattaatggaaactttaatcatatatgaagcttatcaaccgggggatactctgaaagttcgaagctgtggatcacgaagcagcattaatagttgttgctgaaataggtctggaataggttgttcatgggggaacgttaatgcttgatggcgttaaactcactgagaagagggaagttggggctgaatggttttaacaactgcatagctggctgccatcacatccaatgaacatgaacaattcggtacattcgttatttgaatttctttatgatcgacttaacgcagctgctgcaggcactccttcatcttaaaaaatcttcaaataaatcgaaaaatgaatgccgatccgataaccagatcggcaaatgtaaaaggaaattactttttcgtagctcctattgaatgaaggtaatcaacggcccgaaattcctaacaaaaaagctattcacaatgatgaatggctgaaagctcaaaatatatttgagagctcctttgttacaatgctagaattgctgtttctaatagtttaatagcatgctcagcatagtacaatcccaggtcatcactaatattattatgtatttcttttatttctttcgatttatttaatttataaggaagactgaacaccacgataagcatttctccagtatactcaagttcaactacttctgattcgcgagatgaatctttgagaatctttcggatcaaaatggggaatatggcttccttcttttccgatttaataaattcatcactcacgttaaaaaagagtttgtagaagatatgctggcccttctcagtactgttatttcttgttggcctcccttcaattatttccagcagtctatcttgttttttatttttgttcagagcatcttgaataagttgatcattcaaccgcagtgtattaatctgcttaatcgaatcctcctttctataaactgtttcaatttcctcaataatctcacttacagtagcactgctcttaaactctaaaaacttccctgactgaactataaactgtactgaattaaacgaattgaataactttcctccactcaaattattaaattcatttatcaggtagggatgaattccttttttctgaccattcacttctaatatccaatcttcttttcgatcatcactgatcaaaacaattgatttcacatcttgatttgtagcatattttaaaatctgtttccaaaaaatcagatcgcccataggctgcttggtactttaaaccattatgaaaataagagtggtttttcttactgtccataaatccaggtgggactttattttcgtaccgctcattaccttcggaaaaaattttatttaggtcatcttgtgtaaattcttgtccaacattatcacctattaaatcattaattctttcttttatagtaagtagatcaggttgttcttccctttggctagataactctttttttattaaatctctactttgttccaatgactcaaccatcttgtgagtgctaatatttgaatgtttcaatttttttaactttgaaataagtttttcaagttcatttatatattctttttccagtgtctcgtattcgtttttttgttcatataacacattctctaaatttctatggtactctaatgctacttggtgtggaatccaaatcctttcttttatactttcaagtatttctaacattgcgtcccttgattcttttggatatctaaaaaggttaagaagggtattagcatcaagtacaaaagcgcagttcccccatagatatgtttgttcatcttcagttagcttgtaatatccaggaaattgttttctcaccgttattgtcctctccttatgtatatttacttctcttgtttcgacataattattctataacctttatcactataattattggcttctaaaataagggattcaatcaatacctctcaataattgaaacgattgataatttatatttataaaagagaaggcagtgatgattgtactcatcaaatcaagtgaagagatccgcctgctggggggatgcgctccagccaggtggccgttttttatcgtaattatcgattggaattaaaatctataattaacattaagtttacacaatgaatacaattatgcatatttaatgttataaaatagaaaatatagtcatttagggagtgtttctcaactaaacacttgaaagtcgaagggagattctatctgtgaaaaaattaattacagctgcattatccatcgcactgtgccttgaagttgttgttcctacggtgatgcttgcagctccaaatgcattagaagctagcgtaagtcaactttcacaagaaaaacaagactttattttcttagaaggaaagccgggagacgcatatcttgtatatacgtacgaaagtaatggagatacgtataaagttgaagaaagagctaataaggattttactgaggttaatagtacaatatatgtgaagaacgctgaaggggaatttgttgagcatgcaattcaaactgctattatcgatacccaaaattctcttttccaagttactactaatgagaatggagtaattgaaacagaaacacaaaattttggtgtcgatacaaccgatctctcaactatcccaaatattcctgtgcgtcctgatagaggcgatttgataaccccttttgatagctatatgggaggtgcagtatctgcctggtactatggttcctggacgaatggtagcagcaaaatagaaagatatactgtcactgccgtgacagcattacttattgggctagcaaccgctgcaaacccttccgctgcagtggcgacatcagttataggtactatggctcttaccattgttcaagatcaatatccacttgtatattataaacggcggtatgcagaaaaaaaatccttggtcgctacaactgtcattgtcggatctaaatgggatactattttttatagtgattcatcccgtacgaatgaattaaatcgtacaaccgcaacaaaatttttgaacgggtatgtggcggattaaaatgaatttaaaaattttccttcaaaacttcttaggattcttcatactctgcagcttagtatttattggattcaatatgttaatacgacataaatcgtgggatgaaatcgatcatatgttaaacttattcagcgcaattatcattagcttagtagtaggtctttcaaaggcaaggaagtaactttctctacgtaatctctctaaatgactataaaactcgtgacttcactcatttattatgcgccttcggcgcttttttattttatatgtgggcttttatgtatggatacttcagtactcgtatgccacctctactagtgatatgttaaaatggaaggacatgcaataccaaagaaattccacaatgaacatatcctcactctaagtggcttattttataaaccaaggataaacaaattatttaatcgcttgcagacataacttgaagtcattagatggttccgtaaacagcgaatagattaatgaacacttttgataaaaatactgctgcatttatgtcctttaaagaatacaaaactgatagtcaatcgatatatgtggaataaggggtaggccttcctttatctattggggcttcccgggatttcaaatggctaaaaacaacttccgtaattagctgctcctattcagccattattatttgccagatatatacgcgggggacatcgatgagtatgtggaagtaggtgcaatgattgcttattttgattaagtacgatgtaaacacgatagtgagggcagaagacggctatctaaagtggcaaagaagtgtgtagatcacggacaacgtgtacagaattccgtatttgaatgtatatggacgttacccagtttagacgattaagatttgaactggaagaattgattgataaggattcagatagtcttcgattctataacttaggtgataagtacaaaagtaaagtccaacaggttggagccaaagattcttatgatatcgatgatctattaatactctagcaggtgcgaatgccaagctcacatggtttccctgggggattcgcaccgcgaaatatgtcgaaaaggtcttttttgtgaccttttggcaatgattttatgtcataagagttttaaagtagtagaaatatcgaaaatacgttaatagctatccttgaaaactagtttttacgtcacttttcgctgtcgcactctgtatggagtgcgtggattgaaatataaggttgttcgcgtaattcgggttcgtagcgtgtcgcactctgtatggagtgcgtggattgaaattatcttatatgatgtaacaccgtctgggttgttagtcgcactctgtatggagtgcgtggattgaaatgcactaaagccagattgctttgccacttcggtttggtcgcactccgtatggagcatggattgagatctagcgaacgtcattatgtctgtggctaggatgttgtcgtactccgtatgtagtacgcggatggtgctttagcattgttaatgaatagggatttagcgttgctctttgtatgaagtgcgtggattgaaattgtccagacgtcttattgcatacttccagtggttgtcgcactccgtatggagtgcgtggattgaaatattgttcttaatgaccagggtaatgggaaataactcacattaaagaaatgcattggaatggcaaataactacttgtgagtgagaaagttataggacacatgaacatgtaaaacagctttgggcttacatgctaacgctgaaatcacttagcattagaaatgcaattccaagtaactttacatggaatgtatattacctgatgtgaaaagtaatacttgaatagtaaagtaatacattataatataggtaatagaataggaggtagcagagtatgagtgtgtatgaatcaggtaaggtaacttcgaaaggacaggttacaattccagttgaggtaaggaaacaactgggtatagctacaggcgacaaaatcattgtgattatccaaaatggcgaagcaaaattagaagttagtaagcaaaaaaagttaactgatcttgtagggatcttaaagacaggtcaagaacatgatcttcaggaagctaggaagtcagtgatagactgggtgggagacagttacaaaaaaggggagtagcaatgaattttttggctgataccaacatactagtaagattgttcactcaagacgataaggagcagtttgaaaaagtttctgaaatgctagatagcggagatattcagataatggtttcatcaccagtaatgattgaaacatgttgggttctgaaatcacattacaagcatgctaatgttgatgtaggaaatgccctgcttaatctatcgcaaattgataacattatctttgaggaagattacatgaaagatgcgttaaggctgtttgttgaaaagggtaacgttgacattgtggactgttatcttagcgcaaagtcaaaaacaattaacatgccagtagtaacctgggacggtgattttaagaagcttgggtgcgagtattacaagccagatcaattttaaatgtttggggttatatactggtgcctaaggtaattgaaaccagcagtagcggtaacattacagtaaagaatgatggtacaagtattctaaattgcactttatggagttttattggaattatttagcaaatcttttcaataccagaatgcgttttggtcgaaatccgtatggagtacgaccaaataataatcagcagcaataaaaaaacgttatttacaactacttgcactcgccaatagtttggtgcctgaagtacatggaatcgttcgatcaactgctttcccgaattatttctaacctaactatgtctatgttttttgtgtgactataaatgaagcttcataagagacgataagaagaaagcgaacgatttgtttgcaagatcgtctgattcaccctctacagttactccttttccctatttattctcatgctgcaagacaattgtcttcttcctgctataaaattgaacttggggaggactaaacgtttacatactcgcactgtttatacttatatctacaggtttggtatccataattgatattctatttggtataaaagattctggtgaaggaatcagattactggtaactatttcacaggctctattcttcttatcattgttgttctttgttattaagatgcctactaaaaagaagtaataacaacactcgataaaaaaagcagggtagactggttaatccatcagtcttaccctgctttttcatatgatttaacaaacgcattcctttgcttgctcttgtatcacttccaaaccagcgcacttgcaagtaaccgcctcaagcttaattcttctaaatgtgctttcgcttattcacatctctccacaactaatataatcgaactccccctcattattcaggaaactacgctgaataacttcacgttgcgaacttgaaagtctgtacattacaaattcaagtacttcatccatcccaatgaattctgtttctctgtccacattatgtatagtgatattctccgttgcgtacttaggttggagtaattaaaagtcaaagaaacaacaacagatgaagagatacgagtattgtctggaactcttgttcaaagcttgccgtttagccagagaagattctcatggttttcatgggaaatgtgtgttgcttatggtagaggataataggtttgtattatcagattgtttcaacatgtagagtttggtaaacttgatagcgtggtgtatgtatatcagcctttggaattggtttagattgttgaacggatgaggttttatgaggcaggtgcgaaccccaagctcacatgatttccctgggagattcgcacctcgaagtttgctgaaaacgtccttttcgtgaccttttggcaacgataatcatgaatgtactcagattttcataattaatattgatcttatttgataaggaaagcggaaatgcgtagtaatggtctggaaacgaatcttttttgcgtattttttcgttgtcgcactctgtatggagtgcgtggattaaaatcctcatcctgctcagcccctaaccactttgatattgtcgcactctgtatggagtgcgtggattaaaattctttggtttcctccggtgtctccgccttgtagtgtcgcactctgtatggagtgcgtggattaaaattcctttggcatctacgtgatgttagccagttgattcgcactttgtatgtagtgtgtggattgaaataaaatcatatgctctctgtcccgtactaacatcaggtcgcactctgtaaggagtgcatggattgaaatttcaaatttacttagatatgccagcgaggctaagtcgcactctgtatggaatgcgtggattgaaatatggctctacccaaacaccggaagttgcaacatagtcgcactctgtatggagtgtgtggattgaaatgttgttagatgaacgtaaattattaacaagggcgtcgcactccgtatggagtgcgtggattgaagtgtactagccatgtcctttgtccaataagtagcctgtcgcattccgaatggattgtagattaaaatccgtacatggatagtctgtctagtataattttgacgcattccatatgtagtgtttcgggttaattacaaatggcttgccgttagttttgtgatctttgatctatatcagaattggagtatcgtatgaatagacaagtacctatttctttcgctggaatacctcctgttactcattcgacttgaatgtagagaaacgacacgtttacccgaatttctcgactctacacttcatggtgtcactggttgggcgctaactcggcattcggaatcttatacgagaatcgccgaaggggtggagctccacaggatatcgtcaacccttatatcattgaaccaccccgaccaaagccagtttatgataaaggtgatgcgttatgcttcaagctcatcttgatcggagatgcggttcgttacgcaaaggatatcgccacttcgttgactcaggcagagacatttgtaatcggagccgaacgtaaggcattcgaactaacagacatttttcatgcattgacccatttggaaacagggtcaattcgagatgaacgcagctacacccgaaaatatttctgtccattcgttgcaagaatatgctttatggtgctctgtacatatgttgacccctgttcggatacgtcgaggtggggctctggtacagacaattgattttcccacgatcattcggagcattacgaaaagaattcagttgttgacggagcgttatggaggaaatataaacacggatgtagcaatgaaggtatgtgaattggcaagcaagattagcccgacgtcttccgcattatatctgaatgagatgcatcgatactgtagtcggaaaaaagaatcggtgaattggagcggcatgctgggttcactaacgtttgagggggaactgtctccctttatcccttggctgaacgctgcccgtattttacatatcggaaggaactccacttttggttgtggacagatcgatgtggtctacaggtccatgtaatggaagtagtcttgtccatgtaaacaggattttgatatgattgacgaggatatgggctatgaatcctttggacggagggtatcgttcatccttgatccagtggtagtaacgaattgcgaaatgccatgaagtcatctgaagcaggtgcgaacccaaagatcacatgatttccctgggagattcgcacctcgaaatttgtcgaaatcttcagttttatgaccttttagcaacaagaatattgagtttatatgctgttgtgggatatagtggagctaatatgtggaaaaagtatcggaattacgtaccaaggtattctaaacataacttgatacgtgtatttccgctgtcgtactctgtatgagtgcgtggattgaaatttcttgcatagacaattgttggctgtgctgttcctgtcgcactctgtatgagtgggtggattgaaatcggttatggtgagcgaacaggttcagcctccaggggtcgcactctacatgagtgtgtgaattgaaataattaaattgcgggtgcctttttttgtcgtactttgtaaggagtatgtatattagattgccaatcgaatgatatagagatgaaagaattttcatagctgttttaactacatgtagaattggagttaacaatgaataagacatcacctattttctcgttcagaatatctaccgctactcattcgactgcaatgcaaggaagatgtacgtctgcctgcatttcttggctcaactcttcatggagtgctaggttgggcattacccaagcatcaggaatcctacgagtacctatatcagaatcgtcgacagggtggagcgaaacaggatattgtaaatccatatatcattgagccgcccagacctaaaccattgtatcgaaaaggggaattattaagcttcaaactgatattacttggagatgcaattcgatatacgcaggatattatcacgtcattagtcgaatttcgtatatatggcgttggagcggaacgaaaggtgtttgggctgttagacatattgcatgggggaacctacgaacctctgtggcaaaaggaaagtttacatctgaaatcaattgttccagaaaatatttccgaacacgagacttatgaacgcgcttcctggagctcgattcatatgattacccctgttcgaataaggcgtgggggaacactggtgcaaaacattgatttctcaaccattattcggaatattacaaggagaatcacaacgttgactgaacgttataggcgatatatcgactcggagatggctgagtatattgtggaacgtgcaggtgacgtccgtatcatctcctcagcattgtatttgaaccagatgcatcgatactctaatcgaaaaaaagagtcccttgactggagcggaatgctgggcactttgacgtacgaaggcgaattatccccattgatcccttggctaaacgccgcacgaattttgcacatcggaagaaattcaacttttggttgcgaacagatcgatgtaatatatagataagatcttctggtgacatttgcctgcacgagtaaggtgcgaaccccaagctcacatgaattcccagggaggttcgcacctagaaatttgtcgaaagcttcagttttatgaccttttggcaacaaggatattgagcttatatgctggtgtgggatatagtggagctaatatgtggaaaaagtatcggaaatacgtattaagggattctaaatataacttaatacgtgtatttccgttgtcgcactccgtatggagtgcgtggattgaaataaatacacctgggacttgtagatggtctgcctgtggtcgcactccgtatggagttcgtgaattgaaaattccgctgcttgctgttaactaaatgttaatacattgctttatatctttggtcattagaattggagtgtcttatgaatagacaagcacctattttttcgctggaatatctgccattacttattcgactcgaatgtaaggagacgacacggttgcccgcatttctcggctcaacgcttcatggtgtgactggctgggcgttaactcgacattcggaatcgtatcggtatgtctttgaaaatcgtcgctttggcggggctacacaggatatcgtcaacccttatattattgagccaccccggccaaagcccgtttattatagaggcgattcgttatgcttcaagctcatcttgatcggggatgcggttcgttatgccagagatatcgtaaattcgttggttcaggcacagacatttggaatgggagcggagcgcaagccgtttgaactctcagccatttttcatgcagatcagtacgaacccatatggaagcagggccaacccgatatgagcgcaatcacaacagaacatagttctgcccatgcgctgcaagaatatgcttcatggtgctccgtgcatatggtcacccctgttcggattcggcgaggtggggcgctggtacagaagatcgattttcccacgatcattcgaagcattacgaaaagaattcagttgttaacggagcgttatggaggaacggtgaacacagatgtagctatgaaggtctgtgaactggcgaatggaattagcccgacgtctgccggattatatctgaatgagatgcatcgatactctagtcgtaaaaaggaatcggtggattggagtggcatgctgggttcactaacatttgaaggggatttatctccatttattccttggctgaacgctgcacgtattttacacattggtagaaactcaacatttggttgcggacagatcgatgtggtctacagatccatgtagtcatctgaaacaagtgcgaaccccaagctcacattatttccctaggagattggcacctcgaaacttgtcgaaagcatgcttttcgtgaccttttggcaacgataattttgagtaggtgctgatttttcatattaaatgtagatgtcacttgataaagaatgcggaaatgcgtaatatgtattttttcgctgtcgcactccgtatagtttattgttttggatttttctgaagcgttcgtagtcgcactccgtatggagtgcgtggattgaaatgttacatagttagcataacgatagtggttaattgtcgcactccgtatggagtgcgtgaatgggaaatgtactgtggctattccttgagtggtagtacaacgattctcattttgattgcattgcaggaattgctataaatagcagtaatgataaattactattgtttgaattcatatgttttatactttttggggaatatcgggctgactctccttggttgggatttaatgggtcttacttttaattatattatggatatcaatgagatcagtaaagtttaaccgccccctttcaggccaagacatttggaatcggagtcgaacgtaaggcgttcgaactaacagacatttttcatgcagatcagtacggatctatgtggaaacagggacaaaccgagatgaacgcagctacacccgaaaatatttctgtccatgctctgcaagaacacgcttcatggtgctctatacatatgttgacccctgttcggatacgtcgaggtggggcgctggtacagacaattgatttttccgcgattattcggagcattacgaaaagaattcagttgttgacgaagcgttatggaggaaatataaacacggtagtagcgatgaagatatgtgaattggcaagggagattagcccaacgtcttccggattatatttgaatgagatgcatcgatactccagtcgaaaaaaagaatcggtggattggagtggcatgctgggttcactaacgtttgagggtgaactgtctccctttatcccttggttgaaagctgcccgtattttacattttggtaggaactccacatttggttgtggacagatcgatttggtctacaggtccatgtaatgttaaggcatcttgtccatgtagcaggattttgatgggagtgaggaggatatgggctatgaatcctgttggatggagggtatcgttcatcattgatccagtggtagtaatgaattgagaaattccgtaaattcatctgaagcaggtgcgaaccctaagcacatatgatttcccagagagattcgcacctcgaaatttgtcgaaatcttcagttttatgaccttttggtaacaaggatattgagtttatatgcagttgtgggatatagtggagctaatatgtggaaaaagtatcggaaatacgtatttaggtattctaagcataacttaatacgtgtatttccgctgtcgcactccgtatggagtgcgtggattgaaattttagtacaggatgcgcagtgcatcaggatcgtccgtcgcactccgtatggagtgcgtggattgaaatacatcagtaaatgtagttagtgggccttgataaacgtcgcactctgtatggagtgcatggattgaaatttggatatctaacgtgtctccttgcggtactgttgggtcgcactccgcatggattgcgtggattgagataaccatataacacagcgaaaggttgtgctccatcatccttcgaatagctgctgatacaccattgtacactcctgtgaactagttttaacaattgataccgtggtttatgtaatatgggaggttttaaacatgagtaacctagtaactttttcttccaaaaaacgttgacgcctagcaggtctgaaagaaagaatacaaaataggttgggcataaaatttgaacgagtacatgaatcgtactcggaaacgcaagccaaaatagatcgagcaatgttgaaagaaaccatgcatgtgacatctcagagctaatgcagctctacttcacataaataggggtacaacgaaatggaaaactcttaaacgtggatatgcaccctggaccgaggtgccgaaatccaacacacagtttcaacgccggaaccaggagctattgtgcatggtagacacatggttgtgaacctgcatgatcagggacaacctgatttgaagcccggcagtgttcttgtcgttcagattatatctgcgaccgatgaagtggaaaaggcattgaaggaagggacattggactgtcttatattccaatcagcaagaaagagcatccttttctggatcaagacagttacattagtagcgggcagatcatgcgacttattcaagaatggctggttcagtacataggaagattatcaaatgaatgcaaggaggatgtgaatcttcatgcactccaagcacgtgtatggctttttcgtgttatccattattaaaaaaactaaaatggctccttagattaacatcgtttaattactcttaatcctaaggttgatttcatgtgcaagtaagtaacatgttacatctggcttttaaatgagatctaatttaatcttagatgcgattactagcctgacagagtcccactaacaatgcagaaaatatagtaaacttttaaagaaagagtaatgcttgttatagagttacatatacccatcggagccaaacaatatgtggatttttggagagagttgttatgaacaaacgacgaaagaacctaatgtgctagtgagcgtctttaaacctaagcaagccataccataatggatgccaagaccaaaaaagacttaaatgtacgcgttaatttatcataacgaatcactaaaaatttcttactttattaaagaagcattccaccaaatggcgctctttgtagacataccaatcatatttcaggatcactcactcggcgattttcctttccgggaatcaccggtatggctttttgttccttcaaaaaggtccgaatggcattcgtatatacgctcggtcgtctaaaacttgcttccgggtcagtttcatacttttaaggattgtcccgcagttgccaatcgaatcaagttaaacgcgatgctattgaaaccttggacgggctccggtcaagtcaaagcgaatgggttccctaacgcttcagctaccgcatgaattttcatgcttaatcacctcgggaacgtccgatcgcttgctttcccccctttcgcctgatccatgctggtgaactcgcacaattgtggcctttttgaggttttcgttcaggtggaaacaaatcttgaatagcgaccattgtctcttcgtgaatttagtatcgtgtatttattcgatacagtaaacctatatattacaattttatgaatttgagacacgtccttgagagattaacaatttttttgactttggtgacttctcagagttaaatttcatgaccctagtaatcataattgaaaatgattaatttgtatggaataatataattagggaacataggttctttaatcttataataggattgtggtagaatgggaaaagctattgatgctataaatgctggtctgacttatcaaaatttgtatttttgggtatttgcttccgagttgctacataaagaatccaacattcgaaccgtatcatatgaagatgatcgggttaaatctctcgatgatgttgtagttgaatatcataaaccaattgcaggcgattatggtattgatgatgaaattacgatggatttttaccaagttaagtatcatgtaaagaatacagaacagattgaattgctggacctcattaacccttcatttattaacgcttcgacacactcatttttacacagagttcgggatgctataaagcaaggatacaccaaagcccgattccatctactaactccatggaacattcaaaaaggtgatctcttagaaaagctattggataatcatcataataagttgaatttagatttatttttcgacggaaaacagagaagtaaaattgcacttgctagaaaatatatgatagaacaactcgaacttcgtgatgaggacgaattgcgacaaatccttagaagtattcgtattcaacatagtaaaccaggtatctcattaatgattcaagaacaactaaacacaaagttaatgctggctggacttaagccaattgatgcaacgattcttgtcaatccatataatgatttaattgttaattgtgctagtaaagggagtaaaaactttaacaaagataatcttcttagattatgtaaaaaagagaggctatactcagggcggcctttgattctaaacgatgaaatccccgtcggaattagaagttttcttcttccttttactgaaaatctagcagaagagaccagccatctactttgtctaagtgaccattttgatgaacgactaatcaaagtggaccgaagttggatcgctgacattgcaccaaaactaaagggattcatacaagaagttttttcaccaggtagtgcctacttaattcaatttattacacatctctctataacatttgtttcaggattgatactcaatcctaaatctggagtgaaggcatttccagtacaacgtggagatggattgatggcttggataccagatatacattttgatgaagaacctgactacatgagcttcttcaatgaaaagttctcagataatcaattaaatcaaggggatacagtagttgcaattagtgtaacccgtaatgttaaagctcatgttgaatggtatatagaggatagggatcttcaagtacaaactttctatcatttttgtatgccttcagttggatttaaagctattaaagatggtactcatgcttggttacttgcagagcaagtcattaaggtgctagatcaacgtaacccacgccagagaaaaggaaaagttcacttttttattgctgcgccgggtggatttgttttcttccttggtcaacaagcagctaatatacctagaatagagctatatgaacatgatttatcaggtgatggatcatatcattcttcgttttcactcccactctaactaaaatggaggtctctctgtgaatattccaacctactttgcaagatttcttaaaggaattttatgaacagagaacaagtggatgatcttattaaaagccacacaacgctaagaaattgattagatgctgatgaagaaatatctaagattattgtaagtttatttttccaaggttaatttatttagatctagatgttgttattagtgcagctccttcagaaagtgaagaagggatattagaatctaacagtgtaaccgacttacgatttttggaagatattgaaacctggttattgagagctcttgggagttcttaatggaacaatggattcaagttctatcaaaaaaatagtctaatgtgaacgaaacctaaatggaaatcaattcctctttgtattccggatagagaggcagaagatgtggaaacaaaccggccctcttgctcaaattaaatgaactcaagaaaaacaaatcttgtaatcgtcattatgagtatctcagcattgatctagttgtagtaatgaactgagaaatgccatgaagtcatctgaagcaggtgcgaaccctaagctcacatgaaatccttgggagattcgcacctcaaaatttgtcgaaaccgtcctttttgtgaccttttggcaacgaaaatttggaatggatactgatattcttaataaagatagaggatacttgataaagaatgcggaaatacgtaatatggatagggaaataaaacatggatacgtcttttttcgctgtcgcactccgtatggagtgcgtggattgaaatttacctttcgggaagctcatcagctccgcctcgagtcgcactccgtatggagtgcgtggattgaaatccatcacctagagcagcacgcacttcatcaggaagtcgcactccgtatggagtgcgtggattgaaatggcttggttccggaattcgtcggatttttatacggtcgcactctgtatggagtgcgtggattgaaatgttaaccacttgtctaccaatcctgtctgtttgttgagtcgcactccgtatggagtgccaggcatcttttttacaaagtatgtattgtgaaagcacccttgggaagaaacagagaaacgtatcactcaccgtgagaggaacaagtagtaactaagaatgagtccatatattaaaagaagaaaagcaacacagatcagtatactggagggcttgaaggtagaaggtaatgccttgctaacaaaacaatctacaattgaattaactttatgttaatcaacaaccccaaaattctgacccatgttcagaataggactaaaactagatcaattaaaataaatcattcagggctattaaagctcgctttacgcgattagcggagagcgggtttttcgtgttttgtaaaataatgtagaatcctctcgaaataaaagggaatatagcccagcatagagaaagaataacacgtgagatctaagtcttcagaatcattttatgggcctgaggtctggctatgtgaaacatgtggaagctgtatagcagagatagaaaagggaggtagagaaatcgtggagacatatgtctttattgatgtgtcgagaaagcaagagtatatttaccgaaacaagagtctgcgagacaatctcatcagttcttatgtgattaagactattacggaaatacccgaaaatacagatgaaggctctcaagtagttggatcttgtgttatgttgaaaacatttctagagatgcattttccaaggcaatatactgtgatttactctggtggaggcaacagcatgctccgatttaatgaggaagagcaggcaaagcaatttagcagagcatattcgctagaagtgctacgcgattatcctgatattgaactgtatattagtaaaatgacagagcaggagcttccagaggagaggttttcagaagagaagttccccggagtaactaagaagaatatgaaagctatccggcaaatgcttaatcatcgtgctgacctattgaaggataagcgtcgagccatgtttcgtcgctggagctatggagtcgaaaaaattggcgagagtggcaagccgatggattggcttaataaacatgaaaatgagtttgaatctggagcgattgctaaaaagaatgatcagtcgttgcataaggctcgccattttttgtttggtcgtctggaagagcgtttgaaagcattggatgctaatcataatttggttcagatcacaacggaattggcaagctacaaagcccaaaatgatcaaaaaagctatattggcatcattgccttagacggaaatcggatgggtgagatgtttcacaggttggattctatcgaagacatgaaggaattcagtgatgaaattgagcgaatctactcagacgctgttgctggtgcactctatcactatgctgttcgccataataaaacgttgcaggttacacccgtgttgatgtccggtgatgatatctgtctggttacacaagcagaggatgcgctggacattgcggcagacatcctgaagcagcttcaaggattgtcgttggaggagaaagcaaaaaacgttctggaaaaagcgatgaatgcggtgtcaggccaacagtcttatcttaccgcatgtgctggagtagctatagtcaaagttacttatcctttctttgatgccatcaagatggccgagaagctctgtcatcaggcaaaagaggctttgcatcgttccgcggaaaataaagcggttgcggcatcattcatcgactgggatatcgtgcaaggtcaagtaagtgcccagactgcttacgagaagcgtgtggcaagagccagaatacatgaaaaatatcgtatcagaccgctaagggttgatcaggatgcaggcatagaccatggggtgtatagctaccatgctttccgtgacctggttactgagctacatagcatgatgaataagcaaaattcgaatgaacaggatgtcagtagttcttttcttgagaaaatcaagaagcaattatacagtggctgggagagttacagtttgttattcgagctggatcagacgggctctggagataagctgtcacaactcgtgaaaaagcattttgcacaagatcatcaatccgttgatatggattcggatataggacgaatcagaaccaaatatggggcgatcattgaacgtaatgccagagacaattgcgatgaatatcgatatgtattgaacgatgtgctggagacgatggcatttatctatgggaaggaggccgttgttcatgggaagcagtaatgaatatgtgctggagcttcggctattgagcgaagctatctttgccagcggggagaaggagcggaatctggtccaatcccgagcacttagcgatgattatggatttgtctattttcatgccaagtccttaaaggggcaactcaagcgtcaggccctctggttattacggcaatatattgccattgggaaagggaattatgttcaggcatatgattttctctattcaatggatgtcttgtttggcgtcaatacatgggagttgggaaaagcttggggcttagaggaatttatgagtggttatttgaaatataggcaggcagaaaagggtcttcgaggtcagggaatgatgaaacttactcatctggaactgccacatgaggtgaaggatgctttccgtacgataattgattccagtgaattctcgatacatgatttgatatctgcccagacgtatattcgaacggagatacaactggaggaaggcattgttaaagacaaaatgctgaacacgtatcaagcggtcaaaaaagggtttgttttccaagcacaaatcttcttcgaggaagaccctactcaagtgttaccggatctgttgcgaattatttgttcgctggatcgaatcggtgctggtgttcaccgtggacgtggggagatcgaagctacgctcctgattaacgggaaggatgcacggcaggaactacaactgggagggggagcaacggcatgatgtggtatcaggtcattgagattcggaatctggagcctttgaagattggcgctggcggcaataaagcccattgggatgagccttgtaaggactatattccgggctcaaccttacgtggtggagcaatagctcgtatgcagcgtctgaatctgttcggggattcaaagtcagttttacaacatatggaatgctccaatgcttacctttatcagaatgggcaattgtatctgccgtccccccaacatttacgtatggacaagcatgagtacagaaggcagagaagtctgtttgaccaaggatacgttaatggaacggtggaactgactaatttatatacagctgctacgtcggaggaagtgaatgcgcacagccaaaacttgccaaagaatcagcttccgcagccttacgtaaccattagggatggacacatggagggcattagaccaagcaaaaattatcgtcttcatcatagttcactgcttaacaaggatctacgtgaacgagccaatctgttcagttatcaggcgctagatcctggtcatattttccgctcagtgattgcctataaagaggatatcaaaccacagatggagtccatgtgggaaggctcagacaattggtatcttggaggttctaaaggttctggctatgggcgttgccaagtgaataccataggcaatccagaatcagattatgcagaggttcgacagcaacttgggatcaatgggcctagaagtgaagcagattcacctgaggaagtgaacgtgctgacgttaacctgcctctctgatgttatcgtgcgtggccgatacggtgagccattgtcctatttgccggaggaagttttggaggaatacggcaatatacaattaaaacgggtcgctgatggacaaggtcatttcgtgcagaccggtctgacagaaggatataatgcgacctggaaagcacgatatccaaaggaaacaaccatcaaggcgggctccgttatgcgatattatttgaaaggtcaggtggatgaacagacacgggaaagagtaattgctgctctagagcaacatcgatatggtgcgcgcacacaggagggctatggttggattgccgtcaatcttccgtatccttcccgattacgagtgcaatccattccagcagtttcgaaagagagtcgagaacaatcgtctaagacacctactgtagatggtcaattcgaacaaatagtgtctgatgggaaatccattgataccaaatcaaactctaaggttgcacctcatattgctgattccattcgattaatcagtaaggggctgggtgacaatcgacagcactggctgcgaatgctgtccaaaaaaatgaagaacacacccgccacagatggttttggagtactgaaggtgaacaaccttaagtcgcaccattgccaggttatgatcaaactgttgaaacagtggcttcatgatcagggtgtgtcggaggttgctgttggcttagaaaccaatacggttagcaaacagacataccgtcaaaataaagaatttttctcactggaaggcgttcattttgatgagataatgaagtttttgaagaatgatcgggtcgcccctgagcatgaaaagttgtctcgattggcagttatgaagcttaagagcagccatggccgaatgtattatatggctgttcagactgcaactgattcgataatagctgatattgcggagcagaaacgttttattgccgaattgctctacgaggcattgtatatccatcaaatgtctaccacaggggaggcgaaattcgaatgagcactagacgacgatttaccttcacacttcgggcgaaaacgccgattcattttggaggcaatttgcagggggcattgttattagatggagatgacaagccatttgttagtggcaacagcattggcggggcactgcgaagttggctaaatgccagcagtgaagtgatatctgcagatatcatgtactacttaggcggaccgaagaaatctattgatgagaaagaagaattcgaggaaagtcgagtttatattagtgatggtcacttgaagttgcctgataaccctttggtaatagatcaaggtaatgctggattgttagctatggaaggaacagcagttgatcccaagaccggatccgcactcaacaaccataaatacacacgttatgacctaccgcaaggaacagaactggtctttacggtcgaatgcgatacaaatcctgaggaaaccacatcacctaaagaggccgatataacggatgcagcgcatgtgaggctttcttttacaaagctgatctatacttgggcgacagcgattcatcggggggaattacggtttggcggacaaaaaagtaacggtcacggccggttctcattggagcatttaacatgccgtgaatttcttttcgatagttcggaagccctggagcaatttatttttaatcgccacaaaggtgaggagaaagattgtaccgaggatgcacggaagtacgtagagtatatcttgggccatccaacgattgaacttagcttgaagggacacttcccctatggtgtttatcagtcatatacggatcgggaacagagcaaggaacatggaactcaggtgacagggcttctacgtagtgtagatgaaacctattatttgccgggctcaagcatcaaggggatacttcgtcatgaaatgagacgacttttatttcgtatgctcccggatcaggagaggtctattgctgaacgtgaaatacgggtggatacacttttgcaggagtggttcggaagccaggacaagataggatcggttatggtatccaatgttgttatagatgaagtaagtgaaatgaatattgaacgaataaataaccagaacaccaaaccgacatacaatcgaattgaccgaatcactggcggtgtcattgacggggcgctcaaaacgcagaatgaagtacgcggaagtgcggagattcgtttggaactcagagttggtaaagacgttgaggacgttaaatacgctgagggcaagctgttcccgctcatatatttgttgcgtaacatcggttcagggttacttccgcttggaggaagaacggtgatcggcctgggacagtttgaggctaaggaaactgaggtttatcttgacggagatatactgagattcagcaataccggtcctttagatgaaaaaggtcaagctgagcttaaagtttactatgaccttttcgtagcatttttgaataaagagggggaagcttgaaatgagggctgcatttgacattaagcttatgccggaaaagccattttccttcattgtgcatttatttgatcggatattgttaggcacaactaatgatgagagggaatatgggaaactggttcaagcgctggacgaagatatggtgctggaagggcatttttttgatgggaaaaaggagttatacgttgcgcgggaggatgggcaattggtagcctatgagccgatcatcgttggagatgaagagagcactgttatccagcgaagctacgagttggagcaggctccctacaatacgactgggtcgggcaaagctagatatacgaaattgactgtatgtgaacgaatcgcctatgaggatgatttggcttatgtagagcttactatgctgtacagcttggagaaaggagatgcgcaatgagtgatcaatatgttaagcattcaagccataaacgctctaaccagcactcttctggaaggaagccgtggaacaaccaaaagagtggtcggggtcaggggaacgattcaaagttgaaggagattacgctaccttacgactttatctccttacccagtacagatggtaaaccggaatactactatccatatcatcgtcgggatgaagccaaaaagccaccccgtcatgatatgcacgaaaccgggcatctatccggttacatctcctatcagatcaagccgcgctcgccacttgttctcgaattgagagaaacatataaagatggcgggcctacagaatattggttgagcggcagccagatccgaggcaagcttcgctccaatgttgaagtattgagtgccagctacccagaatttgtggatgacagcgaaatgctttatcggaaaattaataagggtgagcgatacaaacagaagcttgggatcacagatgatcaggggttagagcaagcggtaaaggcaggatatttgtatcgtgacaacacaggcagtttctatatcgtccctgctgtgatgattggagagaaacattttgtgtccattcaggaactagatatcattaatatgaagaataatgtgctgccagaaaaaaatagattgtttaattggtctgctttaattgggcgtgagactatgaaacaggttatgactaagcttagtagcgaaattaataaattggatgataatattcgtgattcaagaaagagacttaaaattcgttcagatcatccgatctccctcgctattcaggaagtatttacaaaggattttgttttcactaaagtcgcacgtcgaattaaatatgagaaagatggcatccaaaacttaacatctgaactgcattctaaacttagtattaagcttaaacaatacaatacagaacaacaactagaggagttatttgctcagctcacaaaaagatgggcgttaaaagcagaaatgtatcaaatatatgaagggaaatcagtcaaaaaaacaatctctccctacgataaaaaggtcaagtatgctctttcaggaaaaagtgttacgcgtattgatcatgcttcatctgacgtagaaggaggcatggacggtatgctttttaactctacgaatgccgggtcgaagcgggcacattatcttataggaagagagcaggaagatgcggtcagacttgatgtttcagatagcgtgatcattagttatactaaggcgtttgagagactgcgtctgaagtcgaatgagcaagataaggataaggagcactataatttatttaaggcaaagagagaccaaaatacagagcctcaagtggtgttctaccagacaaggttagagaagcgagaagataattcaacggaagttttagttgctgtgggccgcacgccgtactttaaaattccgtatgatcaccagttgaataagctattgggcgacaaagacgcagaaggtattgactatgcaagtgctctgttcggatttgtatccatagatagccggaaagatcatgatgaggcattgcaagcttacaagtcacgtttgcgctttagccccgtccgtgtaagtggagagattcgtggacaagaaaaaaagtttttgttatcaaccccacaagcttctgctggagcgatgtacttgaagcccaacggtagagggattcctacttatgaagggtcagttgaaactaagaccggacaagcaaatcgtaatgcaccagatccaagtttacgaggggtcaaattttatcacgtgttaccccagacaattccaacgatacctaaggacattgatgaatcgagtagtatgctgagtcaacgccaagtctatgatccatcacaaatatcatttgattttgatggggaaattcatttcaaaaacttaaccaaagctgagctagggctgctattgcttgctatggatattaaactcttgcccgacgttacaacttataataacgaaggaaaaccatactacgagcttattggtggagcgaaggcctatggttatggcaaggtacagtttgaatcgattgtagttttattggaacagcaagaaagtagtttcgagtcactggtgattgaaccgttcaaggcagcggaagttgagcctgctgcctttgtaaaggcatatagtgaattgatgaagagtgattctatcttgaaacgagttgatatcaagaggtatgttcaaagtaaattggaaagagagtttgaagcttctgatagaaaccatgtgaactggagtaatatgaatgaagtgagagcaaatttaggcgagaagcaaagtggaggtggatatccgactgattgggttttgaagtctacggtagagtagttttaatggccaaagtatgaggtgcgaaactcaagctcacatgattttcctgggggattcgcacctcaaaaattgtcgaaaacaccaattttgataccttttggcaaaataacggttgagtttatatgttgttgtgggatatagtggagctaatatgtggaaaaagtatcggaaatacgtattaaggtgtactaaatataaattaatacgtcttttttcgctgtcgaactccgcatggagtgagtggattgaaattcgttgtcatagccgcagttaaatgcgcgctgtacgtcgaactccgcatggagtgagtggattgaaatttattgggttagagtacaccgattaccggcctggggtcgaactccgcatggagtgagtggattgaaatctatgcaacgcaaaaaggccccgccgatattgggtcgaactccgcatggagtgagtggattgaaatatcaattatgatctggaatatttattactttatatgtcgcactccgcatggagtgcgtggattgaaattggatgggtacgatctgtcgaagcgacaggttaagtcgcactcctcatggagtgcgtggattgaaatttgcgagtcattggctgtatggccgacggtaccctgtcgcactccgcgtggagtgcgtggattgaaatctgaccgctctcagatcatcgttccagtcgtttgagtcgcactccgcatggagtgtgtggattgaaatattgatatgtcggccaaagcggccaacgcctatctatcgcactccgtatggagtgcgtggattgaaatctctggtttgtcataaaaatcaaaaccgtatatcagtcgcacaccatatgtagtgcctcgggttaattacagatagcttgccgttagttttgtaatctttgatctacatcagaattggagtatcgtatgaatagacaagcacctattttttcgctagaatacctcccgttacttattcgacttaaatgtaaggaaacgacacgtttgcccgcatttctcggctctacgcttcatggtgtgactggttgggcgctaactcggcattcggaatcctataggtatatattcgagaatcgccgatggggtggggctgcacaggatatcgtcaacccttatatcattgagccaccccggccaaaggcattctatgataaaggtgatgcgttatgcttcaagctcatcttgatcggagatgcggttcgttacgccaaggatatcacgacgtcgttgacccaggcacagacatttggaattggagccgaacgtaaggcattcgaactaacagacatttttcatgcagatcagtacggacccatttggaaacagggacaattcgagatgaacgcagctatacccgaaaatatttctgtccatgcactgcaagaacatgcttcatggtgctctatacatctgttgacccctgttcgaatacgtcgaggtggggcgctggtacagacaattgattttcccacgatcattcggagcattacgaaaagaattcagttgttgacggaacgttatggaggaaatataaacacggatgtagcgatgaaggtatgtgaattggcatgcgagatgagcctgacatcttccggattatatctgaatgagatgcatcgatactctagtcgaaagaaagaatcggtggattggagcggcatgctgggttcactaacgtttgagggggagctgtctccatttatcccttggctgaacgctgctcgtattttacatatcggaagaaactccacgtttggttgtggacagatcgatgtagtctacagatcgatgtaatgtgaaaagtcttgtccaattaaacaggattttgatgtgagtgagtaatatgtgggctatgaatcttgtaggacggagtgtatcgttcatccttaatccagtggtagtaatgaattgcgaaatgccatgaagtcagctgaaggaggtgcgaacccgaagctcacatgaattcccagggagattcgcacctcgaaatttgttgaaatcttcagttttatgaccttttggcaataaggatattgagtttatatgctgttgtgggatatagtggagctaatatgtggaaaaagtatcggaaatacgtattatggggttctaaacataacttgatacgtgtatttccactgtcgcactccgtatggagtgcgtggattgaaatcctatagctttaagtccaatgagggatgcaacgacgtcgcactccgtatggagtgcgtggattgaaatgaaattgcggcgcctcttcggcgctcacctcccgggtcgcactccgtatggagagcgtggatttaaatttttgccgccttcatacttgtaacttcggttttgagtcgcactcggtatggagtgcgtggattgaaatcagcaagtgttgaaggctatccagccctctgtatagtcgcaatccatacggagtgcgtggattaaaatccgtatctaggaaagtatctttagtgaaattttgacgtcctccatatgtagtgcttcgggttaattacaaacggcttgccgttagttttgtaatctttgatctacatcagaattggagcatcgtatgaatagacaagcacctattttttcgcttgaatacctcccgttacttattcgatttgaaatggaaacgtcacgtttgcccgcatttctcggctctacgctccatggtgtgactggttgggcgctaactcgccattcggaatcttatacgtatgtattcgagaatcgccgattggatggagctgcacaggatatcgtcaacccttatatcattgagctacctcggccagagccggtttattataaaggtgatccattatgctttaagctcatcttgatcggagatgccgttcgttacgataaggatatcgtgacttccttgactcaggctcattgtttaggaattggaacggagcgtaaggcgttcgaacagacaggcatttttcatggagatcagaatggattgacttggaaacaaggacaattcgatatgaacgcagctgaacttgaaaatatttctgtccatgcgctgcaagaacatgcctcatggtgttctgtgcatctggtgactcctgttcgtattcgtcgaggtggggcactggtaaagtttattgattttccaactatcaatcgaattattacgagaagaattccgttgttgacctagcgttatggaggttaatgaacacggatgtagcgatgaaggtatgtgaattggcaagcgagatgagcctgacgtcttccggattatatctgaatgtgatgcatcgatactccagtcgaaaaaagaatcggtggattggagcggcatgctga

SEQ ID NO: 10 - DNA, 220669 bp, Paenibacillus xylanexedens
  source 1..220669: mol_type = genomic DNA
cgttggcgtagcacgtgggtacttgaaccgtccagagctgacggaagagaagtttgtagacagccctttcaccgcgggtgagcggttatatcgcacgggagatttggcgaggtggatggaggacggaaacgtggatttcatcggccggatcgacaatcaagcgaaaatccggggctaccggatcgaaacgggtgagattgagtcgcagctgctgcgggtggtaggtatacgcgaagcggtggtgctggttcgaagtgatgcgaacggtcaaaaggcgctgtgcgcctactacacaacggatatcgaactgacggcggccgacctgaaacgagcgatctccagcgagctgccaggttatatgatcccgtcgtactttgtggagctggagcatttacctctgacaccaaacgggaaaatcgaccggaaagcgctgccggcgccggaagagggagcaagtgcagggcgcgaatacgtggcgccgcgcagcgatctggagacgaaactggtctccatctggcaggacgtgcttgggtcagttacgattggtgtgacggacaacttcttcgacctcggcggtcactcgctgcgggcgacgacgctggtcagcaaggtgcacaaggagctgcacgtggacctgccactgcgcgatgtattccggtactcgactattgaagcgatggctgaagtgattagccgattggagcagcaggagttcctttccattccggttctggataaaagggagtattatccgctttcctctgtgcaaaagcggctgtacatccagcagcagatggaaggggccgagcttagttacaacatgtccggcatgacggttctcgtcgggcgcttggagcggaatcaattcgaggcggcgctcaaaggattaatcgctcgtcacgaagttttgcgaaccggcttcgaaatggtcgacggcgaaccggtacaacggatttattcggacttggagtttgccgtcgagtatacaaaggcgacggaaagtgaaacgaaaagcattgcggatgcctttgtacgtgtctttgatttggagcagccaccgctgctgcgtgtgggcttagttgaatgggaagcggaacgtcatctgcttatgctggacattcatcatatcgtcacggatggcatgtcgatgggtatcttcatcgaagagctgctacgcctgtataacggtgagacgctggaaccgcttcggattcaatacaaggaatttgccacttggcagcagtccgaacctgtaaaagaacggctgaaacgccaggaagcctactggctggacatgctggaaggtgaactgccaacgcttgagctacctacggactttgtcagacctgccgctcgcagctttgagggagatgtgctgcctttcagtatcgacaagcagatgactgacaacttgcagcgcattgccgatgagaacggtgctaccctatatatggtgttatcggcggcctattcaatcctgctcagcaagtactcgggacaagaagacttcattgtaggcacaccggtttcaggccgcacacatgccgacctggagccgctcatcggaatgtttgtcaacacgttggcgattcgtcattatccatccggggagaagacgttccttgcttacttgaacgaagtcaaagaaacgatgctgggggcctacgaccaccaggattatccgtttgaagagcttgtgaaaaagctgcaggtgccgcgagatcaaagccgcaatcctgtatttgatgtcatgtttgcgctggaaacgaaggaagataacgttcaaagcttcggggatatccagatcgaatcttatccggaaacgcatgcggttgctcaatttgaccttaccttggtcatttcgttgctggatgagggaatgaacgggcagtttgaatatgctaccaagttgtttacgcgcaatctgatcgacaatttcgctcaggacctgctcgtgatcatcacccaaattggcgaacagccttcggtgctgctcaaggatatttccctgaacgggcaatccgaacaggagcaagatgagctagaggctattgatattattttctaatcctttacccggcttgggtgaaaatgggtatttaagttatttaacaaagggtcctgatgacagttgtcatcaggaccctttgtttatgaacgtataattaatgttcctatgtccaaatcagtatgaggctattataatgaaagcctttaactgatataggatgagtactctggtattatagaatgcacagtgattttcatctatttttcagacttagtatttactatagcatcatccatagtcattttagtcttgagagtagctgttgattatgcccaagttgtaatcgtttcaaccgggagacgataggaaggatagctatctttggctgctttacctatggagatcaacatcacgggctgaaaccgttctttatccaggccgaacgcttcggcgatctgacctttgtcataaccggccatagggttggtatcataaccatgagcacgggcaacgagcatgagttgcatggatatgaggcctgagtcaatgaggttcatgtcacgcaattcggatgcgtttatgttcgcataatagggttttacctgctgcatctgcatatccatgatgtcttggggcatgtacccaagttccactgatttgctgaaaatctcttccatgtattcaacgttgttggcatcgtaaaacacggcaatgacagcggaagacgttagtgcctgtgtctggttaaaagaggccagtggtgcaagcttctctttgccttcagcactgtcgataacaagaaaacgccaaggttgcatgttaatggccgaaggggcacgtgaagccttagccagtatttcggtcatctcctcgcggctgatcttcacttcagggtcgtaggctttaacggaatggcgctccaagacgatgttatcaaaatcatttgttttgttgaattgaccggtaattgtgttcatattgaaatctctcctcatatctatattggtgagagtagggtataaattatatctccatctgtctcactatgaggattgtaaactatgaagtatactttatagcaagaagaagaaatgggggaaatacatatgaagattagtgaagtagcgaaccatgtaaaccttccgatatccacgattcgttactacgagaaaatagggattatcccggatgaacatatgctgagagatcataataactatcgaatatatgcgcagagcattattcagcatctggaagtggtcaaacaatgtttagctgttggttttacgatccatgagatccaatctatgatctctaaacatgggttttcaagtaatgatcaagcaagcattatccgagcgaaaatatcagaaattgaagaaatacaaaataaattagagaattccaaacaaaatctgtacgaaattcttaaatcgaatatcacgtgtgaggatggttttggtaagtattaagccggaagtccctctataggttttcattcagtacgttcttacatcatatcgattcaatcgagtacatatcgtcctgtatacgcagattaccgggctgcccagtttccaccttcacctctgtagcaaatacacctggcatacgcccatctgggaaccagggcatctgtttatcaatgacaataaacatgccttctgcatcacccgtgggggagaattgttttccgtctccggcaaatggttcaagttgataatgctcattcaatgtgttcatcgtctcaggaacatcatcgacaggcagaccgatttcactaatacataacagatgcttcgcttcgaaagcttcatcaactgcattatcgagtgaatggtgagcgataaattccatcaagttgccgcttggatcataaaaatagaaggctgttgcatcccagtaggggaaataaaattcatcttgtccatctttggatagcaatgaaatgttacggtcttgagcccatctttttgcatcagcaagtttattcgttggaatcgtaaatgctacatgatagtagggcttctcttgttctagcgcctttttgaaagagaggaccgagttccccgcacggaatgaaacgcatgttgcattatcctccacaagattcaattccagtagtgtaccgtaaaactcttttatggcctcgacctgatgtgtcaacaaaccaacttctcttattatcatttcattatcctcctttaatctcacctttgattgaaatactcgattgttttctcaataaatgccttggccgattgcgtcaggtaacggtcggaccgatggatgatctcaaagtgccggtatggcggatcgtctgtaattcggatgcaacgtagcgtgggctcattcatggcttggatcagaggataaggtagcagtgttcctccgacgttggctttgaccaggctaatgatagaggttgccgaactggtctccatgatggtatttagggtaaagccatatttacggcaataaccgtcaaccaattctctgcctgtaaatccttcggggaacatcaccgtttggatatcacgcaactcctgaatttcaattgtgcttcgttcagcccaatcatgattctcggatacgaccagtacatattcttcactgcacaaaggaatgcgtacaagccgcctatcaggggcagacgtgatctcgatgccgatgtcgacttcattttccaacacttgatttacgacatagatcgaagagataaccttcaattgcacctttgggaatcgggcatgaaaatcaacgagtaacggagtgatacggtaatccaaatccgacggaagaacaccaataaccaatcgtccccgctgatcattccggaattcagctagcgcatcctgggtattctgtaaatgccggatcatctgtacacagtgctctagaaacagagtgcctgcctgggtcatcacaatttttttgccgacacggtcaaataaaggaacaccaagctcatcctctaacccacgtatttgttgactcaacgtaggttgagatatgccaagtttctcagctgcccgtgtaaaatgaagctcctcacacactgtaataaagttttccatctgacgaatctccatcaattcacctctaatcattggttttagtaatcattttaatagaaacaatagtattgttcaatcattataatgatcctatacttaattcgtgcaccacccgaagatcttgtcattaaagaataggacttttggtgaaggcaacgagactactcccatgaggtgattcataatgaaaattttttatattgtattggcgcttattctggcttcactgaacttaagaccaccgattacttccatttctcctctgatgagtaccatacagaatgatctgggtttgagtggcatgaccgccagtctgttaactacactaccggtattatgtatgggcatattcgctccattctctgtaagactaagtagaaggtgggggaacgaaggtgccattgtgctggctttaatccttattgggataggtacgggattacgattgtttgtaggcgcaactccgttgatgatgttcacttcttttctgtcaggtgtagggattgcattggcagggccgctgttgtccagcttcattaagcagtatttccctaaccgagtggcagccatggtcggtatctactctacagcaatggtgatgggggccagcattagtgtggggttatcggttccgctccagcatacgctgggtggatcttggagaggttctttggctacatgggcattacttgcagccattgcattgccaatctggttaaaattagcttggtctgcgcgtacagagcggcaatccggacaaacttcggctgtagtccatgcaccacttccggtgaagaacaggcgtgcatgggtgctgacactgttcttcggactgatggccgcgatcttctattcattaaccgcctggcttgcgccagccattcagagccatggatatagccaagagactgctggcaacatccaaacgttatttacattgatatcactgccctcaacgttattcattcccatgcttgtacaccgataccaaagacgtgtcttctggcttgttggatgtgcgatgttggagttaataggtgtcctgatgctgaatctctctgtcagtccgtggctcgcggcgattccgctcgggattggtgcaggtggactgttcccgattgcacttatgttgccgattgatgagacaaacaatgctcaggaagcgagtagctggtcggctatgactcaatctggtggctacattcttggagcacttgggccgctggcgattggctggctccgcgatctaacaggcagctttgtgcaagcattttatggtttggctatcatcatcgtgttgcagattatcgttcaattggctattggcaataaaaaaaggttaaaagttagccaggagcagagctaaaaggcatgtgaagtaaaatggatatagaaatatgatctttatacatgatccaacaagtccagatagtactgccttaatgctttctgtaaggtgacaggctccataatcttaatcgatttaccatagcctgcaagatatctcactatgaaatcaagctcgtaaggttcatatgaaccgacaagatacatgtgtcccatctgctcgatgatctgcatagatgggaaatgttcttgctggaatagctccatcccggcttcgtcaatcaggcatttgaatggaattgcttgttccgatggtttccatagagactgggcatcctgtgaatagagttcctttacatgagttaaaggttcaatatccgttgtttcggctgaagtgatacggtcgcagcggaatacacgatacgcttgtttatgcagatcataggcttggcaataccaatagcctttcctggcataaagcgtgatgggttgaatggtgcggatatgggtgtgtgcagaagatggcctttgatcagaggatctatgctgattagcgtacgtaatctgaatcactatattctgcacagcagccatcaacagaaattccaaatgtgcactatcacggatctgctccgtatgtcggaaggaaacccggtgttgcatgttctcaatatcctgtcgttgtttgtcggataacgcgctcataaatttctcatgaatggtccggaaagagacttgaaagggtaagctggagaagctgcggagagcctgcatcgcaaaatatagggcatgaagctcacccgtattaaacgaaatgggaggcagctgcatctgttgcagcagtcgatatccgccgtagcgtccatattcgacatagatgggcgcacctaactcttccaatgaagcgatatctcttaacgcggtccgtttggagatctggaactcctgcatgagatcttgcagggtgaactgttgtttttgattaataaagcgcagcatctggttcatacgttctgattttttcatatcaaaccctcttaatggtgccatggattggcaccttttgttgttatagtgataagtgtaatccaataggaacaaggaggcaatataatgaattttgaagtgataccatttttgtcgatgaacggggatgcgtcggcagccattgatttttatgaagagtttctgggcgccaaggtgatattcaagaaaagttataaagagatgaaggaaatgaacccaggttttgagtaccctaccggtcaagatgagtatattacacattcggtgctggagattggggttaacaaggtcatgattgcggaagaagcaatggacacggagagagcatggcagctggggaacagcacgtcactatgtattcaatccaaggataaagatacaatcgatcacctgtatcattctctgatgcaacatgagggtgtgaaggtactggtaccgtatgaacaaaatgaattcagcccaggatacggtattgtacgggacccatttggcattgcgattcagctgtgtgtcactgtgcatgatttttaaaatgagttcaggcccccggttaagcacttggtatgaaagcctgtaactaactttaaaacatcaaaaaaagaagagccatggatatcatgtgctcttcttttttcggtttctatacaaggttgttcgagcaaccgatggttatagcggacctcttttcgtgtaaatcatagaggtacggatgtcgctgtgtacaagcaagttcaatggataaaggaaagaagggataacatgattacaagaggaattgaccatattggaataactgtaccggatatggagcaggcgacactatttctacaacaggcgtttggagctcaacttgcctatgaccatataacgccggatgatcccccacaggaaggacccgaggcagagcttaaattaggactgcgttcaggagcaaaggttattcatattcggatgttatcgctcggggagagcgtcagtatagagttatttcagtacgcgaatacagcgcaatcagagccagttacggcatcggatcatggtttgcaacatatggcgttgtatgtggacgatatgcaagaagctgcacgacacttcaaagaagcgggcggggtgttgctaacagagcctggggcgttgaccggtcatattgaaggcggggaaggcaatcagtttgtgtatggaagagcaccttgggggatgctgatcgagctgatctcctatcctgcgggcattcagtatccgaatcacagtgaaacaaagcgctggacaccacgaaaaaaataataaagatgagactggataagaaacagaacgacgcatgacaaatcgtcctgtttttcttgtatataggggttaaacggttattaaaaaacagaaattatgttacaaatacgttacaaatacagaagtgtatacctctttgcccttatgttacgatacgtactagtagatacagagatattttacggataagataagttataacgtctcttttctggacgatgaatatgctccgaaagtatgttgatggaacccttttatccaagatattgaagaaacattgaaacgaaggaacaactatatattttgacttcacagggttgcaataaaaataaataacaacaggtgatccaaaatgctgcaaatcgggtatccatagtagagccatctagaacctgatggatacatatgttgttatgattgttttttgctagttaaaggctgtctattatggaatgaactgtgggggttatcaagtgtctatattagatatggaaaagaaagatgttgtcaccgatgcaatggtcatcaaggcgatggagaaaagtcttgctatcattcgattcgatctggatcgccgggtaacctacgtgaatgaagtctttgcccagacgatgggatatacggtagatgagatgtacggcatgaagcatcagcaactgtgcttcggtcaatttgcaaatactccggaatatgatgctttttggaatagcatatttaatggtgtcagcttccaggacaaggttgaacgcaaggatgcaaaggggaattccgtatggctagaggcgacatatatgccggtgtacgatgagacgaatcagaagatactgggtgtctccaaaatcgccaccaacattaccaaccgtcagaacaacatttccatcgtagtgaatgagctgaaaacgatgtctcatgaactgaatgggcaggcagatgtaggcattgaacgcagccaggaattaatgtccagtatctcctatatctcagaggtgtcaacttctaaccgtgcaacgctgactcatttgcaggaacaggccggatcgattcagggcgtggtacgaacgatacgcgagatttcgtctcagacgcaactgctcgcgttgaatgctgccattgaggctgcacatgcaggagaatacggacgaggattcgatatcgtggccaaggaagttaagaaactatccgcaatggtggagagttcgattaatgagattcgtgatagcgtgactggaataaccaaggaaattggtaatattacaggcggcaccaaaaaagtagaagaatatgtggagcagagccagaagcagattgagattgcattgaatgattttacagcaattgctgcttcagctcacttgttggatgccaaagcggagcatgtgaccagaatcgtataacaatatatagtaatagcggttccttgcacaggaaccgttttttttgtcgttttgtacacaaaaaaacgggaattattgtgatcaaacggggacacaatacttgggaatacctgcagctttgtcatgcagagaaatgttggggtgggaacatgtggtcaacaattgtatcctacgtgccggattggtccatatggatccaggcattcttggtcttcatcattccaattggtattacattgaacacgcgttggatcaatgctgccattaagcgcggaagtttctctcgttcgaagcaatcgtccgtatcctcgaaggatatctcgccagcagccaaagggcagggtgaagggaccgaaacaggccaatatgcgaatattaaattaactggaaagtacaatacggatctgaccagtgtaagagaaagctttggtcaaaatgctgacgtgcatattcgggagtttacgattaggggtacgaatacacgggcagccgttatatatacggaaggcctggtagatcaagatttaatcgatgatcacctgattacaccgttaatgttggagggcgttccagagcttaagcgagaggggttcctccatccggataatgcacatttactgtcggcctacctgcaagatcaactactacctgtcagtctgattgaggagacccagtcccttcaaaaggtctcacttggcgtgctttttggcaagaatgcactgttggtcgatggattgccgggagctctattaattggagctcataagatcaaaacacgtggtgtaaatgaaccgttgtcagaggggttgctccgtggacctcgtattggttttacagagcaattaagcgataatacaggcattttgcgtcgttatggaagtgatcagagcctgtttattaagaagtatgaagtgggttcacggatcaaaaaagatttggcgatagcctatattaaggatattgccgatccaaatctcgttgctgaagtatgcaagcgaatcgaagagatggatatggattcaatgctcgaatcaggttatgtggaacaactcatcgaagataatacgctgagtccttttcagcaggtactgaatacggaaagacctgaccgggtgatgggtgcccttctggaaggccgagtggcaattttgttggatggaacgccatttgtcctcgtggtacccgtgaccttcagcatgttgctccaatctcctgaagattactatgaacgctggattcccggtacatttctccgggtcctgaggtttatgtccgccatgctggcccttcttgctccagcgctctatgtctcttttatatcgtttcatccggggttgattccgactaagctggtactgacgattatagaaacccggactggagtcccgtttccttccattatagaagtgctaatcatggagctctccattgagatcctgagagaggcgggaatacgtttacccaagccgattggacctgcgatgggtatcgttggcggtttgattattggtcaagctgccgtacaggcgggaatcatcagtcagtttcttgttatcgttgtagctgttacagccatatcctctttcacgattcctgtctatagtgcgggattaacgctacggattctccggtttgctgccatgtttagtgctgcaatactaggtctgtttggtgtcgttatgttcttcttgctggtttgtacacatcttgcacgactctccagctttggagtgccttatgtcgcaccagctgttccatatcacttgagtgattggaaagattttgtcattcgtgctccactcaacatgatgagaagacgtcccgagatgacgaatccggtagatgcagatcgcaagaagtagacaatccacagaaggtctggaggtacaacaaagtgaatgactcgcgagtgaaaattaacaccacacaggccgttgttattatcgttaactacatgcttggagcgggtattttgacgttacctcgaacaactagcagagccgttggaacgccggacgtctggatttccatcttgctgtctgggctcattgtcacaggtattggtctgattttggttaccctgtgccgcagatttcctgagaaaaccgtgttccagtttacccgggagatcaccgggcgctggattgcttacatactgggttgtgtgacaattttgtattttatgatcatttcagcattcgaaattagagtcatggccgatgtcacggggatgtatctgcttgagcgcacgcctacatgggctattgtaatggtatttatgtggataggcatctatatgatctccggtgggcttggtgtcattattcgcgtgtttgagatcatcctgccgatcaccttgattatatttgtcatggagatattgctcagtaatcagctcttcgagattagtaacctcagacccgtattgggtgagggtatcatgcctgtactcaaagggctgaaaccatcgctactgtcgtataccggttacgaagttatgctggtcatcactgcatatatgcaagatccgaagaaaagcaacaaggcgatcacatgggggttaactatctctacaatggtatatctgatcactgttgtaatggtcgtaggcagtttgtccttggatggaattaagaccagaacgtggccaacattggatctggtacgaagttttgagatacaggggctgatatttgaacgtttcgaatcgttattgctggtgatctggattatccagattttctcgacatttgccattacccattactgtgcttccgtaggaatccgggacttgtttcgggtaaagaagttacgttggattatgtatgccctgcttccattcatttatctgacggcaatgatgcctaaaacggtatttgaaacttttgcactgggcgatatgttaggtaacgtatctgtagttttgttcgctatattacctctggtattgctgcttatcagcataattcgcaaaaaaggaggcaaacacgcatgatttcattccgcatgtgcttaagagtaacttgtgctgtgttcatcctgtgtataatgtcaggttgctggagcagccgcgagatagaagatctgagcttgtatgtaggtctcggaattgacgttggaaaagagaccgatttcgagaagaagatttcagcgcagggtgggcattatcccaaacaaaacaatgtcacagcaaccgttcaaattgcccctgggaattctagcagtcaaaaaagtcagcaatctggttcaccctcatctggcaaagagtcttattccaatgagcagcttacgggagattccatgctgcaaatttttcgtcagtttgctttgcggcgagatcgtccactcattggacatcatctgaaggttgttgtgatctccaaggatattgccaaaaagtatggactgattcaattgctcgattttgtactccgggataacgatattcgaccgaactgtcttgtactgattagtcaccagcgggcggttgatgtgcttacctcagatgatccttcccgtattcctgcattttaccttacaggcattacgaacaatgcatacatttccaacaagattctggaacccgtttcgctggcaaaactggatgcacagatgcagtccgggtccagttttctgcttcaaaatgtgctgaatgccaatggagaggacaagttctccgggggcagcatattcgctgcaaatacaaccaaatttctgggagaactcagccaaactgatgtggaagctctgtcctggcttatgcctaaaaaacagggtggtgtcataaaaacatatagtaaggagggattcacgatactctatgaaatcaagaagaagaaaaccaaaatcattcctaaggttattggcgatgatatctcgttccatgtgaaggcagagtctgaaggatggctaatggaggattggcgggcaccagaagaagaggaaaagggagcatatctgaaagaaatggaaaacgattttgctgaactggtcgagcaacagatcaaacagttactgtacaagctccagcatacctacaaagtcgatgttgccgatttccacgatagcattcgtattaaatatccaaaaacgtggaagaaggttaaagggaactgggatgaaatctttgctactatacccattacgtatgaggtaaagaccaccatcacgaatccggggtcttccaccgaatagcgaggtgtgccatatattatttaattgttgacacattcatgatagatcgctatattagtaaaaaatcattttcttatccagagaggtggagggactggcccttagaaacctcagcaacagatctgaaggatactgtgctaattccagcgggtgaaagcctgatagataggagcgtttgtttttatttgtcagtaacggcgcactctttaggaagagtgggtcttttttgttttttctggatgaagaagtaggggagcagcagttatggagaacaacaacgataaagggcattttcagcggaaaatgcaggcacgacatgtggtcatgctctctctcggaggagtcattggaactggattattcctcagctcaggttacaccattcagcaggcgggaccactgggaaccattctgtcctatctgatcggagccatcgttgtatatctggtgatgctctgtcttggtgaactgtctgttcatatgccagagacgggagcatttcatagttatgcagccaaatatatcggaccggcaacaggttacacggtagcttggttatactggttaacctggactgttgcgcttggctccgaattcacagccgccggattgctgatgcagcgctggttcccatcggtaaacgtatggatatggagcgcggtttttgcactgatgatctttctgtttaacgctctaacggtgaaattttttgcggaatccgagttctggttctcatctgtaaaagtagtgactatcgtaattttcattattatcggtggcgcagccatgtttggtatcattcccatggcggattctgaaccggctccatttctatcgaatattaccgcatccgggtggttccctcatggggctacagcgatattgatgaccatgcttgctgtaaactttgccttctcaggcaccgagttaatcggcattgccgccggtgagacggagaacccggaaaagacgataccaaaggctattcatacaacactgtggcgtttggttattttcttcatcggaacgattattatcttgtcggccttgctgcccatgtcggatgccagtgtactggaaagtccgtttgtagcggtaatggagcgggtgggtgtaccctatgcagcagacattatgaactttgttattctgacggcgattctctctgctgccaattcaggcctgtatgcatcttcacgtatgctctggtcgctggctgacaaaagaacgatctctccgtggtttgccaaattgaccaaaagcggagtaccgctgaatgcacttctgattagtatggtgggtggtgcgctggccttgctgtccagcattattgcgccaggtaccgtgtatattacactggtttccatttcaggtctggctgtcgttgcagtatggatgagtatcagtgcctcccaatacatgttccgcagacaatatatccgggaaggacatgcggtcaaagatctggtctaccgcacaccactgtatccggtggtaccaattgtttcatttatattatgcctggcttcatgcataggtattgcctttgacccgacacagcgaattgcgctgtattgtggggttccgtttatcgcagtatgttacgctgcttattatctgacagaacgtgtgaataagaaaagaggacaagtacatgacgcaagaacaacagactaaccccatagaacagatccttcgtgaacatccggtcatgattctggatggagcgttggctacggaactcgaacagcatggatgtgatctcgatgatccactatggtctgctcgtgtgttgcttgagaatccggatgttattgttcaggtccatgcagattattttcgagcaggagccgattgtgcgattacatccagttatcaggcgacggtggatggtttccgcaagagagggattggtgaacaggcagcactggagctgatccgcaagacggtggaactggctgcacaggcgagagatgacgtgtgggcagaagtgcagagtagtttagtagggagagaaagctcgacaggtcagcttttagaagctccttcggtacgttctgagaacgtggagaatgaggagaatagaacagatcgtacagtggatcgcgaagaagacagtcttcgtccacgtccaattattgccgggtccgttggaccgtacggcgcctatctggcggatggttcagagtatgtgggacattacggcgtgtcggatgagaccttggctgctttccatcgaccacgtatggcagcgttgcttgaagcaggtgcagatattctggcgtttgagacgattccttccttgcaggaagcacaggtgttggttgatttgctgaaggagtttcctcatgcgtatgcctggttatctttttctttaaaagacgggacaagcatcagcgagggcacaccgcttgaggtatgtgcacagacgtttggctccgagccgcagattgcggcgattggcctgaactgtgctccgatggaagtggtgacggaagcagtgggtattctcagtagtgctagcgacaaacctgttattgtctacccgaactcgggagaagtatatgatgcagcaacgaagacgtggagtggacaggggacctgtggcagcatgagtgatgcttcggagcattgggttgctgggggcgcgaaaattattggcggctgctgccgaacaacgccacatcagattggtgcacttgcgaagaaatggcggagatagttcatatcatgataacaagcccttccacatcctatagaggtatggaagggcttgttttattgtgttaaggcatcctgattacattattcgataaccagcatacgtggcgatgtttcccgaatgattctcgaagagaaccatgagccaagactggctgcaatgatgcttagacaggtgaacagtaccattccaccccaatgcaggatcagtggaagctgtacgataccataaccggaaaggaccatttcgagtagaagaggcagcagatatacgccgacgaaaatacccagtatggctcccacgaaggacagtaggaacattcccatggtgagcgacaaccggatttggcgagatgtcattcccagcgatttgtatatcccgtacgttctgctttctctacggatattgattctacagatactgaaaataatgatgaacgtcacaatgataaatagcaatccaatcagactcatcggatagatcaggatattagcggcttctgcgtaaacggaatcaagcaatgtcttctgagtaactaccgaagcaaaatctttaaattgctcatttaattccgaggcaaccatacccgcttgtgccatatcgttcacattgatgaagatatcatcaaattcactataatccgggttcacacttctcatggcatcaatggtgattctgcctgaaacagacatgttggcgatcgcctgatagatgcctgtgatgaggaatgtacgcttttctccttcaatatagatatcgataagatcaccgagatctttatttgatgttttggctacacttacaccaatggcaatttcattcgcatgttgtgggttaaccccttttaacgtttcgaatccaagttcctgataactcccgtccagtacactcaagttgagactgatggattggccctctactgctgccaaagactccgggctaattacacccgttgtgttcccttgccagcctacattgctgatcctcgaatcctgcgctaacacgtgctttagttcagccttggggaagttacttttgttcactacgactgctgcgatattggcattgtcatacccccatttagctgcggtctgttcaattccgtttatactggtcagcagaacataccccaaaactagtacggaggaagccatggtagtcagcaggattgttagaacagagcttttggtgtttttgaacacatgtcggaatccaagtacggcggtcacaggcagtcgtgtgaacccgatccagtgcaccaatggcgaattcattttgccagccatccggctgtgatctgtctccgacataccataacgaatagcctgaacgggctgtatgctgcgtgtctttttggcatataaaacagtgaacagaatcactagagtaaatagtagtacgccggccagtatggccgcatccaatccttgaattggaatgttctgattccccactcgaagagaggatacagaaatattaatgatccacttggagatccatacgctaagtgcaattccggggataatggcagcaatggagagcatcgcatattgaatgacataggtacctattgttctcccggaagttagcccaagtgacttgagaatacctatcgttctgtaattggccaagatggcatccgaaattgtaaacccgatggtcattaaggcgatggagagcatgacaacacccatgaagatcataatgaagccaataacctggttaataattagataaaaggaggaaatcgcttcgaactccattctggattccagaaacggagtacctgtctcgcgattgtaccgttcccaatacaatgaattcatactgtaatcgttgaaatgaataccgatcatgtaattctcgttgccagcgagtgccgtgaaatcacgttgataatcagcagaattcatccagacccttgcagtattggagaagggcgctccgtatggtacgtcgatgacaatacccgacacattcaattcgagtgtgcttgagccggttttgaagccaatggtatcacctaccgaaatatgataggcattcgccatggacgttggaatccagacggatcccggatcgggagtcgtgctgggtgttccacttgaaaaaataagttcatccacaccccatggcggcggaggtgtattaaacatgtacaggtagatgttagggatgtgagtttcattcaagatgatgcctgacaatgaacgatacgatagtaacggggacacctgaacgtcatcctgggaagcccaccaatcgtgcaccgtctccgggtcattcagccctttctcaaacgtcagaatctgatgagacccatgggtgcggatatgcatttcatgaaactgattgcctgtgttcgccagaatgacaatagctgtagatacaagaagtgtcgagagtagcaggagcagcgcaatcaacgcattttgtattttgttcctactcagatacgacaagctaagtttaaacatgacagccatcgttattccttccccgtaaccaaagcgaagataatcgcttcacgatcctgaatttgatgttcgtcataagtgtcaaactcaaggattccgccaatcttgccgtccaaaatgtagatcaggcgatctgcccgacaggcggccttgatatcatgcgtcaccataacaacggactgtcctttccggttgagattcgtaaggatatcgagaacagctgtgccgtgttccatatttaagcttccggtcggttcatccgcaaaaatgatatccggcgaattgatcaaagcccgtgcaatggcagctcgctgctgctgtcctccggaagtttgggagggaaggcgattacgctgttcatcgatatccatggcattcatcagctcagcagcgcgggattggatgtcctttgttttgtttccagcgatatatcccggtaaagcgatgttctctttgatggaaaggtccgggaccagattgatgctctgatagatataaccaatcctgcgggtgcggaagttggacatttctcgttcactgtaagcgtcaatccgctggtcgtgaaaatagacctcacctgctgtaatctgatccagtccgcttagcagatataagagggttgatttgccagagccagagttacccatgatgaccgtgaaatccccttcatagatatcgagatcaacattacggatggcatgatattgttcacttccgctgttgtacgttttgcacagattctgtgcacgggtaatcacctttttggacaagttgaatcactcccgagtgcaatataggattcattctagaggagggatgttgaggaagccttatcaaattatgaataaagtattacagctgtggagggtgctcagcagatcggcagatagaaccggaaggttgtaccttgtccttctttactagtaaaggaaatatggcctccatgtgcttcaataatgctttggcagatagaaaggcccagccctgtaccttcctgaacacgttgttctgcatgactcgcctggcctctgaagtaacgctgaaaaacaaacggcatgtcctgtacacgtattccctgacccgaatcggcaatcgtcacattcaaatgctcagattccagttccatatctatacgtatcgtgtctcctggagctgtatgcttgagggcattggcggcaagattggagatcacctgttcaattcgagtggggtcgatagcgattaacacattggggatgtagttgggtcctttatagataagcccctttgttaggacaacatgttcaataggtttcaacatcgtctccagtataggcccactgtacaactcacgggtttccaccgaaatttgccccaattcctgaagtgcatgaaccagcagatcctccacaaggcgtgccgttttatccgtatgggtccgcatgacccccatatattccatcagcgtctcctgatcgttgcatagtccttcctcaatagcttctatgtatgcttttatcgtggtaattggtgttttaatgtcatgagatatattggtgatgagttctttttgtgcttgttcctgctgaatacgctgctcgctcatatgtttaatctccgtgcgcatgagatcaaacatggcatatacttcgagcaattcatcgttccggttgtactggattttttcttcataattgcctttaagcatggattccgcatgttgcttcaattgatggatgggagagagcaggtgtttgtccagttttcgtttcatccagaatagaaataagctcaggatcagtgacaggagcatgagtgcgttaatcaatataaccggaaaagtcatcgattgctgaaccgtaaccatggcttgggggatggaaaagatagcattgccgatctgacttcccaccggtccgtccatcacgggaaacgcaatatcaagcaaatcgttaccgtccgcggcctgcgtggcatgatgcagatcataatggagagctgaacgcagattaacttgcgttccttcagaggtggggtcggaggacagaatgacttttccatccaagtttagataggtaagcagaaccccggtctctctggcggtggaacgtatgacttcacgaatattttgttcattaagatgctgatgattttgctccaaagcgagtaagattggattgaccttgagtcgaacctgattcagggacagattggattcgcctgaatttcgatcttgtaacagcatcatcgacagtgcaaggatacttaaaacgataataatgagaagcccaagtgttgttaacaaccagcgtttggaccagctgttcaatgacatgtgggagcctccaatctcacttattcgtaattgaatttgtaaccgacaccccataccgtcttcagaacggtcggatgcgaggcatctgcctcaattttttcacgcagtctgcgaatgtatacggttacggtattttcatcaccgtaggttgcatatccccagatggcgtcgagcaactgggctttggagaatacctgattcttgtggcttgccaagtaatgaagtagttcaaattccttggcagacagagaaacttccgatccgtttaatgtaactttataggcttttttatcaattaccaggtttccaagatgcagcagatctgttctgtctccaacggatgtcatgctgtcataacgcctgaagtgggcattaattcgtgctaacaattcgctcagcgagaagggtttggtcatatagtcgtctgctccaaagccaagaccaagtaccttatcggtatcactgcctctggcacttagaatgaggatggggatattattgcgccttctgatctctcgacagacctcgatcccgtccatgtccggaagcatgatatctaaaatgatgtagtctggttgaataagctccataatctgaagtccgtcttgtccagtggctgccacggcggcttcatattgatttttggttaaataatctcgcagaatgcgcgaaatatctgattcatcctcgatgatgaggactttgcgctggtgggttagcatatgtatcgctccattatgatagatgtgaatttaatgggtatgtatgaatttgtaaaacggctgtctctatgattgtacagtcttgttctgtgggagtcacatgaaaaaatattgaagtgaacttcattcttataaaaaacgttctgacttccagtcgtactgagagttgatcacagttcaatgtatcaaaataacccatgaacctctttaaggtcatgggtttctgatactgaacatcatacatgctccagatcatcgataggctcatgctgcttggatttgagatattccgccggagacacaccgaagtgcgcccggaatacccggtggaaataggagtaacttgcaaaaccgcaggattcggcaatatgctccagtgtcatttcactgtatttcattcgttccaatgccgcattcagacggatctcaatcgcatattgaatcatggtctgattgtagtgctccttaaataaacggactgcacgtgacaggctgaggcccgcataacgagccgcttcatcaagcttgaacgtaacagtggcatgctcctcaatgaaacgttttaacttcagcgcagaggaaactgcccgatcggtctgtatattctctttaattgcccggtcgatatacagacataatccgcgtagtaacgcatcctttagctccgcattttcctcaagaggcccgcgacgtttctcaagtaacatatttctccacaggctgatgagtttgtcatccagtccaattcggctcacggtagatcgatgctgccgtttccaccagttctcgatccagctgccctcgcagaacagataataatctccgctggacaaacgtccttccttatgtggttcatcgacaacgagatggtagtcgtcaccaggctttaagagcagcaagtccccgctcgtcatcctgaattcctcatcctgtacatacactttgcacgagccttcggtctgcagacggaacagataggtttgcaactcgcccttcatattatgagtgaacgccttatagtggtatgagtagtcacagatcagtacagatgtctctaacgtatccaaagataaaatcccccaatatgtacatccttttacatcataagtttaacttaacatttacacgaaaacggagaggacagaaagaacctgaagaaacgaagtgttcgcctttatctccggattttatccttttgaaaaggaaatcaaaaaaatctggggataacagcgatcggaaggttgttctgtcatcggagtgccagtgtaaatatcttcagttgaaattagctacattcaattgatgcaaaatgatggaaataaaatttgatcagatagttcatgttctgactatattgtatatgttcattctagcctgttttgcgttaggatgataccagatagagcaatgaaagcaaatttgagaacagaggtgtatcctacatgaaaaaacttaatattggtttgcaattgtttacactccgtgatgaaactgcagcagattttcgtggtacgttacgtaaggtagcggcccttggatatgaaggtgtggagtttgccggatatggcgatattccagctgaggaaatgaaagcgctactagatgaacttggactgaaaggattcagcagccacgtgtcattacatgcgatgcgcgaagacttgcaaaaacaaatcgattacctgaaaacaattggtgcacaatatatcatttgcccttacctgatgccagaagatcgtcctgagaatgcagaaggttggaccaagctattcgctgagttacaacaatatggagctgaagcagcgaaacaagggttgatcttcggataccataaccatgactttgaattccatggccaggttggcgatgctaatgcctttgatgccatgttcgctcaaacatcaccggaagcggtaaaagtggaaatggacgtatgttgggtacaatttgcgggacaaaatccgatcgagtatattaaacaatatgcgggtcgcttgccgctgcttcatctgaaggacttcagcaaagacgaacagggccagatgaaaacactggaattgggacaaggttcggttgacctgccagctgttattgaaggcgctacgaatgcaggcgtggaatggctgatcgtggaacaagacgtatgtcagaaccctccgcttgagagcgtatccaacagctacaactggttgaaagaaaactacctgaaccaattctaatggaccatcgaaccatgaaaaatgctaatctatttgtcaaaggagacttatgtacatgagtaaaattaaagttgctgtattcggctgtggagccattgccgagcgcagacatattccagagtacgctgccaatgagaacgtagaacttgtcgcttttgccgatccggttgtggagcgtgcggagaagatggccgagacttacggcggtaaagcgtattccagttacgaagaattgcttgcaaacgaaacagtggatgccgttagtgtgtgtacaccaaactatctgcatgcgccaatggcgattgctgctgcaaatgcaggcaagcatgtattggttgagaaaccaatggcagtatccactgaggaaggcgagcaaatgatcgaagctgccaagaaaaatggcgtgtatttgatggttggacacaaccagcgtttgatgcctcctcacgtaaaagcaaaagaaattctcgaatccggcaaactcggtaaagtcctgaatttccgtacatcatttggtcacccaggtccggaaggatggagtgtggacggagctgaaagctggttcttccgtaaagaagaagcgattatgggcgctatgggcgacctgggcgtgcacaaatccgacttcatccgttacttgctgaatgatgaagtatctgaagtagctggtttcatcagcacactgcacaaggaaggcactaaagttgacgataacgcaacttgcttgctgcgtatgaagagcggagcgataggaacgctcgtagcgagctggacacaatacagagctggagacaacagtacagtgctgtggtgtgagaatggtgttatgaagatcggaacagtggaaggcgatgaagttatcgttgagctgaccaatggtacagttgagacgtacaaagttggtgccatggctaccaacgagaaacaagtgccgagtggtgtaattgacgcatttgtagagtcgattgtcacccaaacacctccagcgatttccggggaagagggcttgcgttccctgcaagtgatcttggcagcattcgaatccgagaaaacaggtcagatcgttaaactgtaatccaaccgaatgacagtgcaatttctaacattctatacggcttaatctatgatataagggacttatcttcagagaagtgttctggggtaagtccttctttatttgttcccgggcaagtgggggaaagtgaacagggatacggtaattgtgcaataggttttacaatagtggatcgcttttacacaacagaaaaggctgatattacgccctatcgcgtaatatcagctctttagagtcatcaaaattaatgatggaatgattaattttctttagatgccagccggtacatcactgcccagatccaaccatgcgatttcagcaggagtaagcgtgatgcgtgatccttcgtcacaggagagcagttctgcctgattctgggctccgatcagcgcacaggttgggaacgtctgattcaatacataagcgagtgcaatttgaatgggtgatgttttctttgaattagccaattgttcagcccgatgcaaccgttcccagttatcatcactgtagaatacacgcaccagatcttcgttatcccgaacttcaggtgtgaatcttccagtgaagaaaccacgtgcttgggaggaccaggatagcaatggtagtttggtttgctcatgccatgccagcgtctctgcatctgctgacacacagccttcccagaaaggttcgtttgctttggcgagactgagatttgggctgctgaatgtgaagcccttcagtccatttgccgcagcgtatgcattggcttcctcgagccgctgccaggtccagttggatgcgccaattgcgccgattttgccggattcaatatgttcgttcagtgcttcaagaataacactgacaggggtattgggatcatcgcggtgcaaggcatacatctctacgtgatctgtctgaagacgctccagactttccatcaagtcactgcggatggcatcagcgttcacacgtggcccattctggtcatgatgcgcgcctttggtgagaatgacgatctggtcgcggttaccacgttccttcatgtaacgaccaaggacttcttcactctgtccaccacaatagatatgtgctgtatctacagtgttaccgccaatcgacagaaaagcatccatgttcgtagctgctttatcgtaggcattatgcacgaaataatcggttcctttaatcaatctggagacacgtttacctgcaccagcaatttcgatatattccataagtcagttcatcctctcaattatagtgtaattcgtgtacgttcttccgctgaacgaaggcaagcttccagtactttcatattagctacggcatcggaaggggcgaagcgcagatccttgccctgaagtacagcacgtgccatatcatctccctgtagagagtagtggttcacttgcgggacttcaatctctctgcgttcaccaccagccgttacatagaagttggaactgcggtcctgtccgctgataaatgccgaagggacttcaataatcccgttggatcccaatacctccaatgtgttgcggaaggctgcccacatgctgctgtcaaacgtcacgccgatgtgattatcgaattccagcagtcctgaggccatcatatcgacctgatcatgctctggggagaacatgccaataacagtggctgcacttggttcttgaccaagcagcaggcgtgctacgctgatggaataacatccgatatcatacagtgcacctccgccccaatcccgccgaaagcggacattgccggatgcattggagttattaaatgaaaatgtgctgtgcataccacgaatctcaccaatctcaccgctggcaatgatatctcggatctgctcatatcttggatgatggcggtacatgaatgcttcagccagatgcacacctgcatcttcacaagcttgaaccatctcctgagcttcctgttctgtcagagccagtggtttctcgcacaaaatatgtttgcctgcttcagcagcccggatcgtccattctcgatgaagatgattcggcagtgggatatatacggcatcgatggaatcatcagcgagcaaagcttcataactgccataagccttgtcgatcccaagtttctcggccgtctgtttggctttatcttcgtctcgactggcaatcgcggttacttcatttaactcggattgctgcaggcctggaatgacggattccacagcaatgctagcgctaccaagaatgccccaacgcaatttttgaactgaattcatgtgttgtatcctcccgtttatgaatgtatattgtgattataaagaatagatcaatgaattaaaatgataatatattgaagttagttaacacaatattgttgatcgaggagaaccggctatgatgagacaaaccgtattgcttactctgcaggatattccatatttttgttatcccgagtccgttggacattatatggaccacgtccagcatgccgtgttgcgtgaggccggcgcactgaacaactttaatattcactacgtcgcttcgggcaagggatatgtggaagtggacggggtggtgcatgagcttcgcgcaggtcaggcgtttctctatttcccgcagcagcggcagcattattatagtagtgaagatgatccatgggatgtacgatgggttcatttttatggtgaacgtctgcatgattatatgatcgagcgggggttacatcgcaatctattgtggacactgcggcaacgcagctcttgggaagaagctcatctggccttgctcactgaagcggaacagaacaccatgctgcgtccggcccagctatccacactgacctatgccgtacttgccgagttcgtgcagcatgcagtacctttaaagagcacacgtaccacaagtaaggcggagagtcgggttcttgcacttcttccacagatgcagcaggaggcctgtcaacctttcctgttacaggattgggcggatctcgcaggtgtgagttcgtattacttttgcaaaatgttcaagagtgctgtggagatgacgcctatggaatttatcactcgttcacgactacagatggcgaagcaatggttactcgaacggcctacggccaacattggacaaatcgcggaggaagcggggtatcccaatgccagttattttaaccgccagttcatggctcatgaggggatgacacctacggattaccgcggattgtatcacaattaacccgtatcctttcgatgttgccagcgcttgaggtatagtggtttgacacagagctcaatcaagtctattatggataaattaaatccgtatataatgaggtgccctcatgaaatattcaaaagcgacaaattatgctttgcatacgatgcttcatcttgtaagtactgcccctgagcagcttgttagtgtacaccaacttgcagaattgcagaaggtatcaccaacatatctgtccaaaattttgaccaaattggttaaggcgggcatgatcgaatcgacttctggcgccaatggtggctaccggcttagtcgtaaaaatcctgatccttctttcctggagatcattcatgcgattgaaggtcaggcgtccctgttcgaatgttctcagaatcataacgcaggctgtttgatccagcaggtgatggtgcaggcggaagaagagatggaaagttttttgaacaataaaaaaatgtcagaactggcttcccagatgaagggtgcacattccctgtaacttgcactagaagtgatctttccccaacctcgcgagaggtaaggaaagatttttttgtatcgttgtacctaatagaaggcgaatggtacaataaggaaggtatagtatgcatacatacatgatcctaatcttacatcacattttacatctctggagggacaacacatgagccaatcaacgattacaggactggaacaattgctcgcgctggaaaatattcggaataccaaggcacgttattgccgctatattgatacgaagcagtgggataccttgggtgatgtgtttgctccggatgcagtggccgatttcagcacggaaggcaatccaattccggtattaacaggccgtgatacgatcgtacaagtattccgtgatctggtggatgttgccgtaaccgtgcatcatgttcatagcgccgaagttgaatttgtatctgagaacgaagcaaaggtcatctccccaatggaagattgggttacgttcccggagggcaatgaaaacaaatccttccacggatttgggcattaccacgaaacttttgtcaaaatcgacggtcagtggtacatcaaacatacaagtctgaaacgtcttcgtttggacctgtttgaatagtataatcagtgtaggagaatatagaagttgatcaatcgtaaaataatagccccgaggagcgtgatgaacgcatccttggggcttttttgtgttagtggaagagggcagctgacacatgtatcatgcatagaaaataggtagaaaaaaagccaggttcagaacccgagggtcccttcctgacttcttttggttagttatgatgttagatctgatgacttgttttcgtgactttccgtgactgcattcttagatacacctgagagaaaataaccgatgccagtgcgaccacagtcataccccaaaaaatattggtgtacgctgaggacagtggcatattctgcatcgccgttaatgctacgccagtaacagcaacactgaaagcaccgctgaagaactgactaagttggaacagccccatacctgcgcccacctgatccatggtcagattgccagacaattcattggacacgctggtggttagggaagagaagccaacgctgagcaggacatacacggccataatggcgtagatgttattgtctgcaaataaggcgaacaatccggcagcggccagtagcagccatggtgcaaatttcaacagcaacgtattgccgtgtcggtcaatcatgcggccgatccggttggacagcagcatggacacgactgcacccgggaagatgacgagtcccgattgagcaggggtcagtccatacagatgcgccaaaatttgaggtaacaggaacaacgttgagaagttattgatgtacgatacaatccccagcgagctgagcatcatatattttttgtctttgaacaaagcaggttgaacaaatggatctgccgcgcgccgaattcggagccagaacagaagcagtgctgcagcaccgataacaagcgtgtaccactgacgggaagtcaggaataacagcacacccgtagtaccaatggcaagaagcacggcacccagcaggtcaaatgaacctttttgcggtgtttcccgcgggagcagtttgaagaatacaggaatcaagaataacgttaatcccgtaacgataaacagatcatgccatcccagaaactgagtaatacttccgccgatgacgggaccaagtccaagccccagtgaactcgcggacatgatgacagccatcgatttaccccggcgatcatgtggaatgtaccgggtaatcagcacaatggcaagccccggaaccgatgcagcacccgcagcctggatcagacgtgcaatgagcaaaatgatgaaatgattactgaagaacccgagaacggatgccgcaccaagtaacgtaagcccggtcgtgaataatgtgcgaataggtatgaaatccgatagacgtgagaacgtaatcgaggaaatggcaaatacaatggaataccctgtaacaatccatgaagaagcgacggatgtaagcataaattcggctgcaattttgggcagggccagattaaacatcattgtattcataacaacgagtacaacggtgaagccaagcaagcttacaattaatccttcctgtattccggtccgttcccctgatgatgcggttgcggtgttgttcataaaaacctcctaaagtgatgtgtatttcgcaacatttcagaaacggtgtgtaacatttgcaaaatgtaatatgatgtcaatcccgtgcctaacagcaggggttacataacgaaatcattaaagttcgattggtgtcgaacattagaaatatatcatggatctgtgttaaaatacaatggatagtctgagaaaaggggactacagtatgaaaattttacatcatccacaggtgtcagatattgaactttcctccgtattgtatgcgttaagcgacccgacccgtcttgggattgttgcggaagcagcgagaagcggggagcagccgtgcagtcattttcatgcacctgttgtgaagtcaacgatgtcgcatcacattcgtaccttgcgggaagctggagttattcgggtcagagtgcagggcactcagcattttctcaccctgcgatccgatgatctggaaacgcgctttccaggactcctgcaacctttattgcaggccgcagctcagtcgagcacagatccttcctaaattttgtcctttcttcaggtcgaagaggggacatttttattttcttttgaaatacttctaaaactgatgcgacattctgtgtcgtaccatgccctatataataacggtgaacacacaaaccatatcgaaaagaggttcacaaccattggcaaaaactaaaagagggcgcgttttgtggagtcttccttccaggggccggggaacatgcccggtgtgtagcagtacccgaattaaattgttgtatacgcaaacaaaaacagacggtacaagtctgaaagtatgcaagaaatgctccaaagccgtgcaatccagagtggataaggcgcatgtataacataactggcctgttcttcggaacgggccatgtcttttgatataatcgaatatattaggaatggatgagatgggggcgggaagatgagtaacatgcatcggattcactggtttgacgaacagattcggggtggacgttttccgaatagcagctggcttgcccgtgaatttgaaatctcccgtcgtcaggctcagcgtgatattgaatatatggcaagttccttgcgagcccctttggtgtatatggcaaaatatcggggctattgttatgaggatcagacttttcgattgccccatttgtatatgaccgaagaagagcagcgtgtgctgaaatatctggcgcatcgttaccggcattacgattatgatcaatcggacgcggtgaaacgtgtagcgcatttgctggagcgttttacgttggaggaacaacagatgggaagtagtgagctcccagtgttttcggcgcaaccgaagcaactgcaattctttgaattgttgtcccacgccataactgacttgcgtagagtacatattcattacagggatcacgatggagaacggcagttttccttgtgtccattaaagatgatatcccagtttaacgccgattacgtggtgggttatgaagcagatcctgtgcagcaagtggcgattcgcttggagggcattgttcatgtatcgatcttggatgagagatttgagtacaggtcagataccctcctaggtggatgggaagaaccactgcctgtgcgtaaaccgtttgtagctgaggttcgcttgaaagaattgcagcaaatggacctatggcaagggtatcgtatccagtctaggcaagatcagatttattcaattgaattttatgacacggacgctttcttacagcatttgtttgttagcgaatgggaggaacttttgtctcctgggtggcttagacgcaagcttcagcaaagcgcagaaggattaattgacaggctcgcgatacaacgtaagcaaaacgtggaataaagcagcatagagaggagaagatccgtccttggctgagaatattttagataacctcatcatgaagcgggagtccaaatcgtacgtggatagtctgcatgcgatactaacccatacaggccagtttcaaggttccaaggttgtacttgccggatatacgggcatggctttcaagctgtcggtgcatcgcagactacttcccatgtcggttacagcatatggacaatggggggaagcacatcgtcctggagtcgataacctggggatattcacgatctgggatgggggacgtacacgtcattccacgttcagttattatcagcaggatgccgtgaattgggcgagacggagtattgatgaaggcactggtgtgatttactggattcctgagttcggtgttattcatggatatgatgacagtgaccgcatcttttatgtgcaagacggatggagcaaggaaccgcagattttgttgtatgacaatttcggcttaaactttaccggattttggtattgtcaggtgtttggtgatcaggtccgcattcctgaacagcagatgctgctggaatccctgcgactggcaattgaggattgggatattccctatcgtctgttacctgatcagaatattgcttcaggcagaaaggcatatgatgtgtgggtggaggccctgcggagtggggatttcgatgaatccggtgcaggttatattttggaatccttctgccattcgcgaaccgaaataaggatgtatttgcagggtgttcgagggatatggaacgaactggaccaggcttgtgcatgttatgaaaagcttgggacgttaattgaccaaatgaaaggatatatggttcagcgggaaaatagacgtgtcttgcgatcagatacgacagaagatctagcacaggtactcgtgaaggcgaaagcactggaagagcaggctgttgattattttcgattgatatccaggaagtatcctgaccgtaaaaggtccactataccacggtggggagcacattccgcacgataggatgagaggggaagggagtgaaggatgatggcgacaaaagtagtattgcaggactggattcaatccccgcaagctgtgagttttgctgatgaatatagatcatggagcggtgtgagcgcatatacagatgcgttgtatcgcattttattacataaacagtggacggttttcccacaccacatgattgcaggtatgacagcaagtgcattccgattagtggtggatcggcgtctgacgtcagagtcaatctccgcatacaattggatggcagagaactttgtcgcagcagacttcattggtgtgacaacgggacaacatggtggattttcatttgaaccgacttttccgctctatcagaagcaggctctgctggatatcaaagcttccattgaccggggcgtaggtgcgattctctggcacgatcaatttgtcattgttactggatatgatgatgtggaacgggtcttattcatctgtgaaagtcaaggtgatgaaatcattcgtctgccctatgattcgtttggtaggaacagtacaccctacttgtattatcaggttctggaagcctgtgcacctatcgatttatgggaagtctgcaaggaatcgttaatccaggccgtgtacaaatgggaaacccatgactatatgctgccgccccaagattacgcctgtggagcggctgcgtatgccgctattgctgctgctttgcagtcaggaacatatgacgcagaacaagcggcaactgtacttcgctattatgccaaatcaagattggatattgcctcttatgttgcaggacttaagcatctgtccattcaaatggaccaggtcatagacgagtatgagctactcgcaaacctgtacacaatgatcattgaggaaatagacaactccatctcttgggattcgagagaaccggaatgtgtgcaaagagtaattgagcttatccggaaggcaggggctacggaacaacgtgccattgatgcgattaaacgtgcctttccagagacgataggcaatcgttttaaggatgttggattaagatgaatggagcatgatagagaaaattgaaaaactcagcaggaataaaaccggacaggcgcagccgatccggtttatttgtattgaacatatatgcacatcaactcatgtgatccacgctaatcataacttttacaagaaaaaataaccaaaattttaattttggggtaatccaaatcccctcttgttccgaatattatattagatggtcttttttggatgatgatattcaaggacaacagggggcgggagtatggtacataatccggaaaccattcaggaatgtatcgaacatgcacggcaaaggctctaccagattgcagctcaatacccggaactatggcatccggaggttattcgccaatccatggtgctggatgagttaattaatgaatataacaatgcaactcgcgggagaacgatctcgaatcaactgaaatcatgatctttctgaacaaagaattccaagaagggattccgtgtgtttgccttactcttttaccgccccgagcacaatcccctttacgaagaaacgctgcaagaacggatatacgagcagaatcggcagagccccaataaagatctgagccgcgttcaccgtacgttgagacatgttctggagctgcgttgcatccacgttcatgttggagaaatcttgctgtacaattatggtctgcattaacgtggcgagtggatatttggaagcatcattcatatagatcaaaccgtcaaaccaggaattccattgacctaccatggtgaataaggagatcgtggcaatggcgggcatggaaacaggcagatagattttgaacagggttgtgatatggttggctccatcgataaatgcggcttcttccagctcttttggcacgttgcggaaaaagttcatcatgagaatcaggttccagacagccaccgctcccggcaaaatgagagcccacatcgtattcatcaatccaagcttctggatcaaaatataggacggaatcaatcccccgctgaacagcatcgtgaagatgaaaaaccacgcatataacgaacgtcctttaaagtgcagactctccttggataacggataagccgtcaggaaaacaagtgtcatactgagcagtgtgccaagaacggtacgttggactgaaatccagagtgcgctgataaagttactgttaccaaatgttttggtataggcgtccaccgtaaaatcaatcggccacagtgttaccagattggcggatgctgccgctttaccactgaaggaaaccgccagaatatggaccagcggcaggatgcacaggatcgagacggccgcgatgaatatcaggttaaaaccattgaatatacggtacccggttgttttgtgatacaccttgattcctcctctgcattttgcataattcgatttgaatcgctcgcgtgtacaagatatagacgaactgaaccatttcgatctctatcttttttattgaaagtcgctgtctggatttatgcaaaatgcttcttaaaaaatacggtaattggcgattttgtacgccatccggtacgcagagatgaccaggaacatcgcgacaaatgatttgaatagtccaacagcggttgcaaagctcattttgccattcagaattcccatccggtagacaaaggtatctataatatcgcctttctcatataccagtggattgtacaggttaaagatctggtcaaaacctgcattcaggatattgcccagcgataacgtacctaccacgataatcatcggcacgagcgcaggcagggtaatatgtaatgtctgtctaagccgtgttgccccatccacctccgaagcctcatacaatgccgggttaatacccgccagtgctgccagaaatacaatcgttccgaatccaaactccttccacacatcactgacaaccaccgttacacggaaccagtcgccatctcccagaaaaaagatcggttcaacaccagccgcggctaaaacctggtttaccagcccaccttccggtgataacatatcgagcagaatgccgcccaggacaacccaggacaggaaatggggcagatacaccaaggtctgtgagaaacgtttgaacgtagagttccgaacctcatttagcaaaatggcgaacaccacgggggcgagaagtccggccacgattttcatcgaagcaatcagcaccgtgttccagatgacctgaacgctgtcgggatattcgaacatgaaccggaagttgtcccagcccacccatttggagccagtgaatcccagccacggtttgaaatcttgaaaagcaataataatgccgcccatgggcacataggcgaacagtaatgtgagcagtacagcaggcaacagcattagatgcagcggccatgtgcgtttgaaattccagcgggtacgtttgcgtggatggggtgtcatttttcgcaccggcgtattggttgttaacggttgttctatagccatcagggtccctcctttatctcgtccagccctagcataatgaggcgagtaagcctctgcacagagtggagcatctgaattatagcaacggaaaagggaggactatagaacaacatttcaatgcggatgttgaaatattaacttgttgatggaaacagaggttttcaagtcacaggaaaacgggagaacataaaatcatatagaaatgtaagggttttcaatataaaataggacttcggtgtagaacgacttcaaattcagggacagggtgaaacaatgaaattcacagtatttgcgaagacggtcattcttttaatctgcctgctcgtacccattctgctgctctatacgtatgcgaaccaggcaaatgtggacatggtcgttgaagagaaacaacagtcgagtctgaaccagttcaattatttcagttcccaggtggataaaaatatcgagcagctctcgctgtatggtctgacattgttgcgagatccgagtatcctgcactaccgttacatgacggattcaaccagccaatatgagaaaaacagcatctatctggatattctcgacaaattatcgttgtaccagtccaccagccgctggaagaacgatattaccattgtcctgccacaagcggaacttgtgttatccaccatgtccagccggacggtctacgatgagaagatgttgacgttcccgcaacctggccaatggcagctggagaaggggagtttcacctactttttcacggataactacgagtggaatgaaaaaccgatgaatacaggcgtgcgaacggtgatggagattaattttgacccgatgaacgtggttgccatgttggatgattttaaagaaacgcagggcggagatcccttcttgctggtaccaggtaacgatccgttgttgaaccgtacggcggacaccgaattggtcgaagcgatcatgcgtgatatgccttttaacgggccggagagggaaggcaatcatcaattggaagtgggcggtaaacaatatctggtcagttacgtgcactccaaacaactgcaagcggtatacgtgaaccctgtggtattggatgatttgctgaccccaatggacaagagccgaaatatgtttattacctccattctgttactgctcgtgctgagtatcggggccgcactgcttttgtatcgaaaagttcaggtgcccatccatcgcttgatgaaagggctacaacagattcgcaaagggcagctgtccacacggattccggtcgatcactctcgtgatgaattcgcgtatctcacccagagcttcaaccatatggcagagcagattcaggaactgatcgagaaggtatacgaggaacgtattcgctcgcgggaagcaacattgaaacatctgcaatcacagatcaatccgcatttcctgtacaattgcctgttttatatcaaaaatatgacccagcttggcaaccgggaagcggttattgccatgtcgctaagtctgggagactactatcgctacattacgcggggcgagaatgatatgacgacagtagaggaagaaatccggctgctggaccattatttgtccattcaacagatgcggaccaaccggctgacctacgagatcgccgtaccgcagcaactgatgtttctccacattccgcgactgctcattcaacccatcgtagagaatgcggtgatccatggcattgagccgatggagggcagtgggcatgtcgttgtaacggggatggcggtacccgaacatattgagggtcggacatatacaagatatagcctgtttgttgacaatgacggtgtcacgctgacagcggaagagattgcggaattggaacgggagatcaatgaaccgatgggtgaggagattggaacaggcacatggaatgtgcaccagcgtctcgttacgcgatatgggctgtcgtcggggcttcattttggagcgattccctatggtggacttagtgtagaaattcgatggtttgaggaggaacaaccgcatgatgaatctgatggtcgtggatgatgaacattccgcagtagagtcgatcgctgtctcgataccgtggagagaacacgggattggtcaggtattcaaagcctattcagtcaaagaagccttggaacatatggcatcacatcaggtccatattattatcacggatatccgtatgccgggtatgtccggtctggatctggtcagtcacatccgccaaaagtgggaacagacaaaatgtattattttatcggggcatgcttccttcgattatgcgaagcaggcgctcaaacatgggacagtcagttatctgctcaagccggtccgagatgaggaactgatcgaatccgtgcagcaggccgcagtgcagattcgcctagagggtgagaaacaattgctgcatcagcgggccatgtattcggtaagggaacatctgcctgagaagcgggcggaactgatgaaggatgtattgttaggccataaatttgcggatgatgaactccaaggcaagctggagcaactggagatcgggttccgtccacaggataaaatgcaactgctgctcatccggtatgatgaccatcaacctacacataaagcgtttcgattgatgaagtacgccatctcgaatgtagtggaagagatctacggcagtacctatcatctctgccatacggatgatgcctatgatgatctggtcttcatggccagtcccaaacaaactcaggccgaaccagaaatgttaatgggccgacttggagagcggttgatccacagtgtgaggcagtatctgaacgcgaccatttccttgtccgttagtcgtatggggcgtttcccggatcaggtgccgcagctatatcatcaagccgtcagtgcacttcgcaagcaggccgaggcgggcaaaggattacatctgaatgcggcggcaggaaccaatggggctacgttgaagtctcttacagcgctgtatgaaccgccgggtctaacgacgttattggaagccgggcgcatggaagatgcacaccgcaagattgatcagatctttgccgaactgtcgaacagtgtgttcccggaacatgtgtatgtggcttttcattatctggcggcagcattctcctatatggctcatcgggaaggaagacagttagccgaagtgcttggcgagcagtaccagcagttgctcaaggatggttatggtatctcgctgcgtagtctggaaacgtggactcggtctgtgatgaagcagtgggaagagagcaccagcgatgcgggacaggatgcgggatcaacgctgattcggcaggttcagcaatggattgaccatcatctaggcgaggatctatcgttgcaggtcattgccggagaggtgcatctgcacccggtatatctgtcgaaaatgtacaaacaatccacaggtgaaggcattagtgattatattatccgttccagaatggaacgtgcggttcatttgctgaagcatacggcgatgaagatctatgaagttggtcaggaagtggggtacaacaacacgccttatttcattcaggtgttccgcaaacattacggactgaccccgcaagattttcggaacggttaacaaatcgatatgaacattgaaattgtgatatatgtttgcctccccggctgcactatccttttcatgtaaggtgcatttggcacataagggtatccaagttacctgaggaggggttagttcatgtatagaaaaatgatgacggcattgctcgcaatcacgatggttgccgtaacggcatgtagttcgggggctaaggaagaaccggcgaaggaagccgctgcaccacttgctctgcaagatgggaagtatgaaccggcggtacagatgagttatttgcgggcctggaatgatgatacgaaattcaagaatggagaaacagcccagaacaatgtgcataccaaatgggccaaggaacggcttggcatcgatctgaccacaccgtgggctgtatcggtgaccaatgatgcattttacacgaaattgcgcttgtccctgtccgctaacgaagaactgccggatattgtctccattcggggagactacaatctggtccgggaattaattgagtccggcaaatttgcgaatgcaggcgagttgtttgacaagtatgcttcggacacatggaaacaggcatccgaatcagcatccgaggaatggtatccatacatgtatgagggcgagcgttatggtattccaatcttcgattatgcgtacaacggcgattcggtcatgtttatccgggaagactggctgaagaagctgggactggaagaaccaaaaaccatggatgaactggttacggtcatggatgcttttacaaatcaggacccggatgggaacggtaagaaagatacgtatggtctgaccgtgggcatgaaaaatgcgctcaatacctggatgacggaatccggctggatcttcggcatgtacaacacgatgcctggacagtggaatgataccggagacggaacactgcaatatggctccattcagccaggtgtgaaggaaggccttgaaacgatgaaagattggttgtccaaaggttacctgcccaaagaagcaggggtctatgacgagatcaaggcagcagaattgttcaccgcaggtaaagctggcattatcgtgggaccacactggatgccaaactggccgattgatgatgtgaagaaaaatgtggacggtgccacgtacaaggctattgccttacctacaggaccaacaggtgagagccaccaacatggatctggtgcaagtaacggcgttgtactgattaacaaggatatggcgaacccggagatattcttcacgtatcaaaattatctgttcgacaactttgccaacccggaagtgggcagcgagttcgaacatggcttcgcgcaaggatatgattatgacatcgtggatagcaaagtcgttggtgaagctgaagtgaaggacggcgtatcaccactcaaatatacgattacgtatgatggtgcacggattccgaatctcatgatggatacactggcggaacttgcgaagggcaaggaaccggagactccttttgagaaaaatacgaagattgccaacaaaccggaagtatttgtagccgctgaggtggtcgttgcgaataaagataacgcgatcaagaacaagttcaccggggcaccaaccgagacgatgaaaatgaagaaggacgcaatcgacaagttggagaaagatacgttcagcaagatcatctatggtcaggtaggcattgaggaatttgatgcgtttgtgacaaagtggaagtctatgggcggcgatgatattaccgccgaagtgaacgagtggtataagacagtcaattaatttacaaagcaggggaggactgataaattcatcagtctaccctgctttttttgtctcgaataacatttatggaaaaatagaacctttggagttacaactattaatctatatcgtacagatcgattatgactcgcagcggacaaaagttacttgttttcctagaatcacattctcaaccttccatccggcatttaaccaggatagtgcctgtgtatgattattggaattattcacccaccattgttcgcgattatacgctgtagggggtaacgtaaatccaagaatctcctcaagctctacgtatgtaatggtgattgaaacttgattcaaatagttttccaaggggaagtatttgctgtagctcatttattcgaacctcctgagaaggaatataataattatacaacgtagggatgatgatagcgagggcatgccgagagcatacatagttaagaaaaaaaagggatccgtagatctctcttactagcgaacaaccgtgcgtaagccttattgttccgggtgtacttgagagagtaaaataataggtaatatacgaacatcaatacgtatgtataacatagatacctcggactatccgggatgaatagaggttcaagtgtggttgatgaacatcataagatgcatgggaaggcaggagatcagatgagtacactttatgatcaggcgatggaagagatgattacgacgatccatgaatggtttgatgaacaggaaaagcgggatgacttggaaagtgttgtgaagcgaaccacactgcaaatgggtatttttaatgatattgtactggattacaaacctggacggaccacggtagacagcctggatctgggtttggatgatgatgatgtgaaatcaaagcaggcaggagtctttaccgaggaacaggtacggaacgagatcgggcctaaggttgtagaggttgttcagggaagattggacaagctggcagacactccgttgattgactaccgcttcaccttacgagggaaattcccaacaaccgaaggtatgctgcaactgactttattggaatggataaacgaagagaaaagaaagctgctccttgagcgtattcatacctatgtagacaagaatctggagaacagtacatatccaacgaagccattggattccttctttttgacaagtcatctgctcgatccaaagctgttcccggagttggatgtagcatggaccaccagacagtatgaccggattcaagagttgaatcagggtcgtccggaggcacttgcggaacatcgtggtgagataactcgtgcggtgacggcatgggcggagaatcagtttttgccacagtattataatgttcagtcttcgccttattgtaccaatgagtattcactaaagcccggagcaacgctggagtcgaacgttgagacacaggcaggccaacatttggacgagcctgggaaggcgcaaacatccgaaactcaaccaatcgatctgctattatacgcggcggtcatgattctacgttttgagccgagttatagtaaacccaaaggtgtgacttttctggagctcgcgaagcaactcggtagcaaacgtgcggcacgtatgatgacagaaggtagcggaacgtatgcgaaggacgatattcatgtgaaaacggaagaagtggaatgcaaagcaaatgatgtatttgctctgatgaccattcacattcgtaaggaagaggctggtgcctatcaacaggcacttacctttatcactcatttattgaaacagggctttccgaaaggttataagatcaagctcaagtccagcgtaaagcagtatttgccgatcaaaggacttgcgaagtcggatacccaccgattctttgccaatgcactggagtacccggagctgcatccactcctggaagagtatgcgcgtgaggctatccaagagtttgagttctacgaggataccgagggagagaaaagctgtatgccgggcagttatgcaacctttggactggggcttgtggatgagcagtatttcccgttggttgaatattacatgggtgaagtggatgatgagcatcagttgattcaggataagttcattgcggcatttgtggaaaaacagggtgtaacggctcaatccatacctgcgttagtcgccagcttgcgtcgttcgaccgatagtctgaagctgaagattcagcccgagctggagaatgaggaaatacttgaactgctggttagacagattcaaaaacttgagcattatgaagcggaacgtgtactctatctgatctttggcaaagtggagaagctctcaacgcttgctcgcaaggccgaggggagacggaaggaattattgctggaactgttgcaggctgcagggaagtgaaaatgtaaacaacacaagtaagattgtgctgtgccagccagtaaaacattttagagaagtgaaagtgcataaggaaaggtgggggaagttgtggaggcattgagacgagacatgtggcaggcgttgaatgctcaggacaaagaggcttggatgcgtaagcttgttcgtcagttaccagacggtatggtatatgagggtctcgagacatttgaacgatttggtcagcgaatagagacaggtgtatttacggaggatgggctgagatttgtgtttgtgcctggggatcaagtaacactcggctgggatcgttggcagcatggtatgaacgaagagacatcagccgacctgcatgaaacggtcagtgagtatggtgtggaggacgtggattcgtttctagcgagtcaaatgtcacctgtaagaacggtcaacattgcgccgatgcttgttgaatgcgaactgatctcacttggctggattgaagtgtccaaggaggaagcatttgcacaggaaaatcctgatttcccttcagcactggagcagtttaagcagtcggagatccgtgaatatgaactgcatcaacaatttcgtctgattcgccaaagtgagaatgaagtccgaatcctgtggttcaacgaaggaatagagttggaagacgttgtgagggaggaagctacagcgggttttggtttactaaccgaagacgaatgggagtatatctatggcggcggttgtcgcacgttatttccctggggtgacagcttcgactatacgatgagattgaagcactttggaagtctggaaggcgtggatgaaattgtggatggattggcagagacggcctcttcacgggttgaagaaaaggatgattgtccttatgatctggaactgccaaatttcttcggagtgcaatttgccggtgatccctacaagtatgagcttacactggattcggttggagatgtgatgcccaaaggcggagacggcggtagcctgatatgtggcggtacagggccgctggttggtttcttgcctgctgctgcggtctattatcgagacgttaatgccagtgaactcgattgggaggatttgatggatgcgatgatgtatcgcagggttgttcgtttggctgaactaaaggtttgatgggttaaccgaaacagctattaagcggtagcatccatacgtagaaagagatttagtgaattctaaagggcagttgacagataaatgaatagatctgtcgctgtcctttggaatgttccattagggccagaagatggaagaaaaagtaatgaatatttagatcaaaagttctatacttaacgagtctcaaccaaatccattacacagagaaggagttaagtatgtccagagtatccaaatggatcatcgtcagtttagtttcaatttttatactcagcatgtcgcaattcacagtctcagcgtccacttcaataactcaaacggctcagaacgcagagcgatccatttcatccacagatcgggtgcaacataacattcgttttgcaatcagaggcacggaggtgaccgtgactacgcttcgaacgagttttgatactggtgaactcaaagaaaatgagtaccattttaccgatccagctattctccctagaatacataccggtctgacgacaacttcccatcagtatgatcctatcgttagtgacacaccagcagggttaaaaggatacataacttattatgccacggatgataagcagcattattacgttttgtacgagtatgactatagctcgaacacacttcgcaaggtccatgagggcgaaaaccgtatccacttggaacctcaaatcggaatatattatacgatctatgagaaaaacgtacctaaatccaactactattccatggtcacaggaaaaaaagtatacactcgcggaaagcttttgctggaaagggattttacagataccaaatatgtggtatcaccgattccacaaacccgtaattttggggtttattgcacagatactttagattgtcactatcttgaatatggcggtataaaggggaagaaggccaaagtaagcgacttgtggatgaagcccgaccagaagacgggcttgtctactaaagcttttcaggtaagtgcagatgttcatctaaatgtttctcaaggcaacacgagggatcggaaatcagactggactgtggttgtaaccaaaaatggcaaaaaaactacactgattaaagagcgagtgggctatgtgcaatcatttatctcacccgaaagaaaaacattggttctggtcacagagaacggtctggatagtaaaatggagtcgtccaaggtacaagtctatgatttgaagacccttaagcggattcgttcctatgattctccttatcgcgctcgtaccgaaagtatccagtggattactgaggatgagtatattattgaacagtatttttccaatccaggctcttacccgccatccttatatgttatttcagaaaataaacatcttaaattgaattatggtacgtacagtgactggaaaaaatattggaattcttttcagttctctaatgtgtttttcccgatggaacctgtagctattaagtctgatcagggtgtattggagtataaagggcagcccaccttctatatggaaggtcagcattatgttcctttagaagaattcactaaagcatttcatattcaatataatctcgggaaggatcggctcaccttcactcgtggtcagcgttcttccagtgtgaatcaaccttcaaaacaattgttgacgctatacaatcagacctttattcctttaggtcagtggagtaaggacttggggctcaaagtgtcggaaacaaaagcaactggttacaacaaacaattaagcatgagcgatgaagaaaagggaactgatctagccatggattccaaaattcttccttttcatgcaagagcacgatggatggatcgggtaggggacagttaccaattagatccggtaaatacaaggccgatggaatcagctgtgccagaccgaattgatggtgtggtgctgaattttgatcgaacattgaccatttcctcctctaaagattcaattacagagttgctgttcatcaatccagactacacttcggtgctcgggaaagtatctttaacggacatacctgagaggaagtggggatttagcacagccaagattccagaaaacatgttacatgatggtgtgcttaacgtgattgttcccgtgaaagaaggaaaatcaacgatggtgtactccttgaagcttccagaaccatttgataaaaataaattctaaagaaaataagcagttccggtacagcatcatttttgctgtgcctttttcatttttttgggtaaatataatcaggcctaatggcttaagatcaggagtgggggcgcattgagcccagccaaggttccttttacaataaaagaatagaatctttcgccgacctctttaaattgacagcatggaaaaggggaatgactttgccttcatatacatcgtttcagtgttgcggccgggaggccttgttgctgttccaactgatgaatattccggaagcggatcagcttctcatggatctgaaagaccccccattacagggtgaacaggccaagcatagctatgaacaaattctcacaggtcttgttgaagaaggtattattgaattggacaatcaacagatcaccatagacccgcaaatatacaacctgcttacaggctgtaagctcagtagtgcaataaccagactagatttgcgtgcaacagatgggaaatcatcggtgacctatggatttttgtcaggcatgcagatggttgagtgggtctgggaacctgcacaagatcaggcgctactcacttcttttgacgaattcgaaaaaatgtttcaggtcattgggaatcggattgaactacctgatccattagcttccaatgtgaaccctcaatcacaggatacaattcgtacacccatgcaggtagaaacgttgcagcgtctgtctgcgttggcggtcgattcagcattggagatgatcgaatctattttgcaagaggaccggcatctggatcagactttgatgcagacattggctaaaggctttgccacgctggagaagtgggggcagtatgaagtgtacacccgaggacaggaaggacagccgcaaaccatttattttataggtagtatccacggtaattggttgttccttgagggggaagagaatggtctatttacagctttcaagataacggaagaagaactggtgcaaagcctgtttctgctaacgacgcgttcattatccgtactgtcgggagtttaagtccgatatgagttatacatatatgtaaactaagggggaatccagttgaccaaaattgtcatgaagtcagactatctgaattcactcgcacagcagattgaacaggtgacggcacaactgcaacaggtggacagtgttctccaacatgccattcagggagctacctggcagtcggggaatcgacagactattattggtctgtaccagacacatcagcatcggtttcagacggctggacagagcatgcagcagctggctgcatatgtaaagacaacccgtgagaagatggaacaggaggatcagtcaggggggacatttgggcttacgggtatcaatccactcgctccttttgatggccctgggagcacggtaggaacattgacaggagcagcggcagttgccagattgggttatcgcgtgaagaacggttatatgatcaaggctcaattggatcggaattctcctcgcgttctggtccgtgagagctatgattcggttaaagacaataaggctacgaacggcagaccaagggattacaaaatccattatgtgcgtgatatcgaagccaaaattgccaatggaacggctactcctcagattaaagaagtagcttctatgatcaagcctggttatgccgtaaaatcggccttgacagacaagcttggctgggcaagtgtgggaatagacgtgtttacagatacccaagagaacatcaatcagaacgcgggcagtgacaaaattgctggtgatatcattgggaatgttgtcgtaggcggtgcaacaacggtaggtgcaacgctgttgactgcggccatcttgcctgcggcggcacctgtgcttgcagtaggtgcagtggggttgggcgtttccgtaggtctgacttacctagctgaaggggttacgatgaatatggatttggacggtgacgggaaggatgattcggtgaaggatgttgttaagcatggtgcgaagaaagcctggtccacagtggcggggtggtttaaataaatggcgaacaaaaaacgttcaaaaccctcggcccgtgacgtcgttgtttctacaatgtatgaaggcactccttacccaagggaaacatttgagaactatctggtcatctatgcggcagatggtattcgactgagtgtaggtacgctggttctgttttttcttaacgtatttctgctcattcccgtgttcagtgtcccgttccaatctatgtatgcgtatattctcgtgccaccgctagtctttatgaatatatgggcgattgcccttattgctgccccacgcagactccaactgaattatgtattgttccgaggggtatttggcatcgtttgttctgtgggatttatggtgattatacagaaatttgcctacgggacacttgctctgacgacaccttggtacgtcattggatcatttgcagtatatggttttgccttgtttcaatacgtgaagtttcgtttgcgtaagctacggcagccccctcagcggaaaaaaggggataaaagcccgggtatgcctgttgccacattaacgatgattacgggcggagcatatcttctggccaatatttcactggcctttgttacgcagcagactgtggctgttgtgctgatgtgtgtatacattatgctggcctttgtcgtgtttcacttcattatggacttgcatcggtattactggcttcgccaggttatgaacaaatcagaggggtaattgcaggatagagacataattaaggagggcgatcattttggaaaaaaatatagcttcgtttctgccgaatgggtctgttattcgtttaaaagaaggcaccaagaagcttgtcatctatggacgcaagcagatgttaatgacagaaccaccccgtcaatttgattatattggctgtctataccctgagggttacattaatccggattatacgtatgtattcaatcatgaagatatcgaagagatcattttcagagggtatgtggatcaggaggaagagacatttgcggcggaactggagcgtaagtagcccgagttgtaaaggtcggttctacatatgaggaaatgaaaaaaaacggatcagtcctaacgtgactgatccgtttcgcggaaacgcgtcgctgtctgttgaagactggtgctggtttcctgtaaaccgcgcaaataatgaccgatgtttgtcatgctgtcattcatacgcccgagaaactctcgctggcgttccccttcccactgtccctcagactgatcaatcatcgttttgagttgggtaagaatatcatgtccgttctgggatgccttattgaactcacccgcaagttgttgcagttcttctggggacagatcaatacgctggttcatgaggtccactccgtttctcttcttgcataagataatgtatattccattataaccccatctttttcaaaatgaagctggacaaaagccttgttttcagatcagtgtagcgtgtcttacataggacaaaacacacatcaaatcagccccagctcatagagcgggaccgaaatgatgtgtgtttctttttttgtttatttcactttttgtacggataccgccatttgctccagttgagtgtgagtcaattggttattcggcgagctgatggttacataacgatcatccagcttgaatgtgagcatatccgtttggtctggtgtataccatctggctgatacgccattaggcagttttaccgttttgccatcatagctgaacgagtaatctttaggggataccgttacattcatacgattaaaaacaaagtttacaccatcaccacccgcacctacgcttttgaacgtatctccagcaaccatatgttgtggggcataggctgttgtgaacccgtcaaacttcgcaaatgctttgcgaatgttatccaattgttgtttgctatagttcacatctgcaaatgcagtgatcccttgatcattgttgctgttggctttttgaacagagacagcgacttgttgcaactgagcttggctcagcttatgatccggggagctaagggtaacgtagcgatcatccagttggaatgtgagcatgcccgtttgatctggtgtgtaccatttggcaataacaccattggagagtttcacgtctttgctcgtataaccgtccgaataatctcttggagacacatccactttcatatggttgaaaacaaaactgacgccgtcgccacccgcacctacacttttgaacgtgtcacctgcgatcatctgctgaggggcataagcggtctcgaacccatcgaattgtgcaaaagctttttgaatcgcctctttttgtgctgcgctatacgttacatttgtcaaagctgatggattgcttgttgcttggccgataatgacctgtccttttttgccgtcataggatacaggcacatgcagtgcatcggcaagcgctcgtacgggcagataagtagagttgttataagtaattggcgcaagtttgttgccattgccatccgttggtgagtaagccgcgccatcgacattaaagctgattccatggttaaggtatgcagagattttctccagttgcgttccggcaaatacacccgttgctcctgttaatgtcatgcccagtaccatcatcgttgctacggatttcttcatgttttttttcatcatatatctctccttcaagttgggggttagttttgtttaatgggctcgctgtcccttatggctttatattaaaccccgaacatatccagaataattctgaattatctccaacttgtaaacatgtgtatataaacaggagactggcatctgtctgttgaatagatcgcttaggatcaggaaatgaggtgaaggcatgacaatttttcattacgtggcagttcattatgatattgggaacattgtaggatttagtgccatagaacacggtaatagttctaaagcgatgttgatcgagtctacacaaggtaagttcgttttacgtaaattgaggaacgaacaacaggcgtggattgagtatgaaatggttcaggcattggcatccgtaaacatttcaccatccattgtacagacaaaatacgagattccgtatattacatataataatgagatttataatttgcagatctacatagaggatttgcttctgtgttcccatagcaacattgactttgttcggttaggtcaggtgatcggtatttttcatcgtatgacgaatcatcttaaggttgctggtatggaagatcgtttcgagttatctcaattatggcgtgaggtttccaatgtagtgttagcctcttcatctgaacaaattcgtatgttagcgcagcttacagaggagtgtttgaaatttcgcaagacgaaacattcagtcattcatggggatctgggcatgtggaatttgttgtttgcaaaagagtccatctacattattgatttcggtgaagtaagaatggacgatcatcatttcgatctggcagctgtactggcttctacaattccctcattaacacataggcaagaacttgggaagattatagctgactttgaagatggttatgtgcaggagaatgctgattttaacaggaggcagctttacgaacagttacaagtatggatgttacgcggatttttggcagtaatcagggagaggggagatggcccctcaaccattggatatgtagaacgaaaactgaagctgcttggtgtgtttgaacgtattctttgccgaatcgaaacattttagttaaaaagatagaggattagtccgccaaaaccaagtacaatcgcaccaacgtatacataggaaagtttgcttaggttttgctttgtgcggcggtcatattcggggttgctggtctgattggctttggaatttccgatgatcatggtagcaatacctccaaacaaggcgatacccacaattaaaacataaggcaaccaggtcatgaatggacctcctttgcgaataatatgttatgtccttattgtacttcaggataacctttgatgtaagctttagttgagaaataaaggaaaatgaagtatctatattacagtatgtatgtggtcttggatcggaaagatcactacaattttatatttttttaattcaaaaaaaccttgatacaacaggcgttcgcagctttcttcactgaaggtcgcgaattttttttacccacagagtgatccagaatagagaaccctgcgttacaccctatgaagacgacgacgaggaaagaaattatacacacaacataatcgaggagtgaacacgtaatgaaaatgaaaatgaagaagtttatcgcacctgtacttagcttgacactgttgatgccggggatcgctggagcagctgccgcaccacagacaccaatgaccatgatgaaagcatccgtgaacacacctgcggctgacctgagagcaaacctggaccacctgttgtccgagcactttgcactcgccgtaacggcaatggcgaaagcctatgacggagcaaaagatgcagatgcagcctacaaagcactcgaccagaatgcactggatatgcagccagcaatcgcttccctatacggtgacgcaggtgccaaagaattcgaacgcatcttccgcgctcataacaaatacacagatgatctggtgaaagcaaccaaaatgggcaaccaggctggcatcaaacaagcacaggcaaacatcaacggttttgtggatgagttctccacattcctgagcacagcaaccgaaggaaaattgccaaaagcagcagccaaacaggcgctgaaagtacatgaagatctcgtgcaaaaagtatttgatgagtatgtagctggagattacgctgatgcatacaaggcttaccgtgaaggtttcaaagaaatgttcgacgtaagtaaagcactctccacagcgattactacacaaatgcctgagaaattcgaaaataccaaagcggatacaaaagcagctgatctgagatctgcactcaaccacttggcttccgaacactttgcgctttcggctctgcaaatgcaagaggaatttgatggacgtacagccgcttccaacgcactgattacagctgaagctggaaacacagctgacttcaaagcagcgattgcttccgtttacggtaacgatggtgccaatgctttcgagaaaatttgggtaacgaatcacgttaatgcacaaagcgattatgtaaaagctgttaaaaacaaagatgctgcggctcgtgcagcagtagagaaacggattgacggattcacaacagagttcgctacattcctggattcggcaacagctggcaatctgccaaaagcagcaggacaacaagcactgacaacacatgaaaatcaagtacaaaacgtattgaatcaatatgcagcaggtaactatgatgcttcttacacaacaaatcgtgaaggcttcaaagtgatgtttggtgtaggccaagccctgggtaatgccatcgtgactcaattcaacgacaaattccaagagccagcaacaccagcaccagatatgacaacggtatggatgcaactgaacagcaaaatgttgaaaattaacgataaaacaaccaacatggacaccacaccagtgctttggaaaaacacaacatacattcctctgcgtttcctgagtgaaggtattggtgcaacggtgaaatgggacaaaaaagcacaacaagtaacggtaatggctggcgatgatatccttgaattctgggtgaacaacaacgttatggaagtaaacggcgtgaagaaaaatgtgggttcaactgtatttgtaaacaaagatggacgtacacaagtacctctgcgcttcattgctgaacttctgaactgggacgtgaaatgggcacaaaaagatggttccattacgctgactaaatcaatgtaatataaagttttcagatgaatcaaacaaaagagctgccccatacggcagcttttttgtattcacccaaaagttccaaatatttggtataatcatcgagtaatgacctacataacagcttgaatagccgatggagtctagaatgctgtatgataatttggtataagcaaaatgaagagggggacagaagaatgagtacatcatcaaaatcggagcgtccagcgagaaatgtggatacccggttatttgttgcttgggccgtttccgttattgcaacaggggggagtctctatttcagtgagatcaagggctttcttccatgtgatctgtgctggtaccagcgcatattcatgtatccactaacgattttgctgggcattgcctactttaaggatgacgtgggcatcaccaaatacgtactcccacttagtttcgtcggtggtggcatttcgttatatcatgtaacaatccagcgtattttttcggctacaggtaatgccgttgcgtgcggtaaggttccatgttataccgactatttgaactggtttggtttcatcacgattccattactggcactgatcgcctttattatcatcatcgtgatgttgtggggtatcggcaagacaccaaaatcttcttaataagaaaggatagatggtgatgagcggacaagctcgttggttcatgcccttcataattctgctcctcctgacggtgggatgctcttatgaggaacagtcacaatcaggcgagatgccagagatgatcaaagtgaaacttgacgttccagagaaggcttctcttcataaaccaacacggttgcaggtgaagcttacacagggagacgcaccgttaagtcatgctgaccatgtgcaatttcagatctggaatgagcttgatgatccgccttctgtctctccggaacaaggtatgatgacagccgacgaactggagaatcagggggctattacggctactgaggcagaggaagggctgtatgaaatccagcatacctttgaagaaccaggtacgtatgtggtacaggtccatgttacgcacggagctatgcatagcatgccgagagcgagaattgtagcggaatgaagcagcgggcgggtagcaagggtttggttcagggttagcagtaggtttataatgttaaaggtatgaagaatgttgtaggaaaagagggtgttatggcaactattcatgatgttgcactcagggcaggagtttctgtaactaccgtctcgcgtgtattaaacaaccggggatatatcagtcagaagactcgggacaaagtgtatcaaaccatggacgaactgaactatcgacccaacgaaattgcccgttctcttctgcgtaagcaatcaaatgtgataggcttgattattcccgatgtatcccatccgttttttggagaactggctagctatgttgagtatcatgcttaccagaatggatttaaaattatgttatgcaattcccacatggacccttccaaagagcgtgaatatgtggaaatgctcaagggtaatcgcgtggatggcattattatgggaagtcatacactggaagttgatgagtatatgaatctgcattccccaatcgtgacctttgatcgtaagatcggtgaagacattccgtttatctcatctgataactatcagggaggggttattgctgctgaattgctgctctcgaagaacagacgacatttggcacatatctgcggtaatttggaattgcaaatgctgtccaatcgccggacgacaggtttcgttgataccttgcaggctcatggagtcaaaccggtcatgattcatgaaaccgatctgaatgtgtttgatcagcatcagtatacagaattggtggataagctgcttgcacaacaccccgaggtggacgggctctttgttacgagtgatctgatggcggtgcatgcgctgaagcagatcgtgttaggtgggcgcaaggtacccgacgatattgctattataggttatgatgacagtcgtgcggcagcgtatacggcgcctggcattacaacgatcaggcaaccggtggaggccatggctaagctggcgattgatctgattcggcgccagctcgcggaagagaagatcggaatggagcatattttgccagttactatcgtggagagagagacgacctgatacaggtcgttttttcatattcgtccttttgcaacggaaaaatgaagtcgtagaaatttttttttgaatggtatgtcaaacgattgacatgtcaaacctttgacattataattcgatttgtaagcgtttccttttaaactattgatcgggggccataacaagatgaaaagagaacagagatggatgaaattatcggtattgtcattgattatgatgcttgtattgtcggcatgtggaggtaaagcagcgacggagtccaactcctcctcagagggtagcagcagtgagagtgtcaaaatcaccatgcttaattcaaagtcggaaattaacagtcagttggaacaagcggctaaagactttcatgccgaaaatccaaatataacacttgaaattgtacctgtaggcagtggacagtctccgtttgaaaaagcgtctgctttgtatgcctctggcagccctacaacgatgatgatgctggatacaggggatgtcgagaaattcaaagatcgtgttctggacctcacatccgagtcttggatgaaggatgctgtggagaatagcacagcggctacaacgtttgatggcaaaaattatgccttcccgttctctattgaaggatatggattcatctataaccagaatgtcttggatcaggcggtaggtgggacattcgatccaaagtctgtacagaccactgcacagcttgatgagttgttccaaaagatcgctgctactggaaaatcacctttgattgtatctccgatggattggtcgcttggtgcgcattatctggggcttgcatatggtgggcagtcttcagaccgtgcgaaggtggatcaattcattactgatctgaaggcaggtcaagtggaccttgcatccaatgccgtgtttaatggcttgttagatacatttgacctgatgaaaacctacaatattgacaaggcttctccactgtccggaacctatgagcgtggacctgaggtgcttggcaagggtgaggtaggtatctggttccagggcaactgggcatggccacaaatttcaagctttgatacagcagatggaaaatatggcttcctcccggtacctgtgagcaataatccagatgatttcggtaatacgcaaatctctgctgccgtatccaaacgcatattgctggataaggaaaagagcacaccagcgcagcaggaagcagcgaagaaatttttggactggatcgtttataacgaaaaaggtcaggatttcctggtgaatcaagccagtattattccggcattcagcaacattacattggagccaaccgatccacttggcaaatccattagtgaatacatcaaggcaggcaaaatcgaggaatcaatgagcacacttcctgcggatcactggtccaaactgggtgcatccatgcagaaatatttggctgacgtcattgaccgtgccggacttgccagtgaaattcaggcatactggagcaacgtgaaataaatgaattaatcatagccctgtgcagcacatagagagagacttgcggtacgccggagatggtgaacatacagcttccacacgaggtctgttcgacttgtttccggtataaccgccaggctaatcatttggatagagtggaggttgacaatgctgaccgaaaaaggattatggacacgtctgcgcacccgcctgatctttactggcccgacattatttgcgtttgctacggtgatgattattccatttttgtatggtatttatctgacgtttacgaactgggatggcattgccatcgatcaaaactttgttggctgggataattacatcggtgtgttcaaggacaccgtgttctggaaatcatttgggatgacgctggagtacgtatttattaccgttgtgctgaccaatgcggttgccttcctgctcgcttacgttgtaactcggggaatgaaggcacagggctggtttcgggctggatttttcctgccaaatctggtgggcggaatcgtgcttggtttcatctggcagtttatttttaatcaggtactcgtctttgcaggacaaaaaatgaatctcacgttgttctccacctcttggttggctgatccggataaagcgttctgggctctcgttgtggtgaccgtttggcagtatgccggttatatgatggttatctacattgcaggactgatgaatgtgccgaaggatgttatggaggcagccagcattgatggggcaagtaatcgcaaaatgctggcgcgcattgtattgccactgatggttccttcgtttattgtatgcatctttttgtcactgcaacggggattcatggtgtatgatctgaacgtctctttgaccagtggcgggcccttcaagagcacagagatggtatccatgcatgtttatgagcaggcctttcttgctcgtgactacggattgggtcaggcagaagcctttgttctgtttatccttgtagccgccattacattgctccaggtctatttcagcaaaaaactggaggtcgaggcatgatggctggacaatcgcgcattctcaactggatgaagtttattgcattaatcattgtgatgattttgtttgtatttccgtttgtgcttctaatcgtcaattcgttcaaggctaaccaggcaattacctccgatccgctgggcttgccaagctcctttcaatttgataattacgtcaatgcgtttgacaaaatgggatatgtatccgcattcagcaattcgttgctcattaccattgcaggtgtattactgattgctctttttgcggcgatgacagcccattactttgttcgtcacaaaagcaaggtgaatcagtatctctttttcctgatggtagctgcgatgattattccgttccaggccattatgattccattggttaaaatatacggctcgctcagcctgctggataacaagtggtcgctgatctacatgtatattggctttggcagtccgctcgccgtatttatctaccatggctttatcaaaagtattcccctggagcttgaagaagcggctctaatggatggctgcggcagagtgcagacctttttccgtatcgtactgccagtgttactgccaacaaccgtaacgattagcgtgctgaatgtattgtggatatggaatgattttttgctgccttctctggtactgacttcatccgagcagcgtacgctgccgttgtccacgttttatttttatgggacatatacagtggattacggtccattgatggctggtctggtgttgaccctgctacctgtcctgatcgtttatctgtttgcgcagaagtacattattcagggggtcatgcaaggggcaatcaaataagttcagtcgggtgatatagagatagacaggagtgaaggacatatgaaccaggaacgacacgagaagcaggaaatagacacaaggcaagagacagaccttggactgacgagttcttcggctcaaacaaaggagaggtatacactcgcccgggccaacgcatatatcaaggcgcatcgacatcaggttgatccaacctatcgaatggcctatcatttgatgccagaggtgggctggatgaatgatcccaacggcttcatatacttcggtgggatgtatcatttgttctatcagcattatccctacgaaccggtatgggggccgatgcactggggccatgcggtgagccgtgatttggttacgtggtcttacctgcctgttgcactggcgcccgatcagagctacgacagtggaggctgtttctccggcagtgcaattgtgcaggatggcaaattggtgctgatgtacacgggacatgtcgtgactggacccgacaaggataacgattacttgcagacacagaatatcgctgtctcggacaatgggattgattttgtcaaaagcgcgatgaatccggtcattcggcaggatcagatcccagagcataccagtccgaaggacttccgtgatccaaaagtgtttgaacgaaacggtgtgtactactgcgtccttggatcgaatgatgctgctggcaaaggtgtcattctgttataccgttcaacggacttgctggattggagttatgtcaacattatggcccagagtgacgggacgcttggtgacaattgggaatgtccagatctgttcacactggatggccgagatgtgctgatcatgtctccgcagcgcatgcctgcacagggagacaactatcgcaacttgcattcgaccgtttatatgatgggatcgctggatgaagaccaaggtgtgctgaagtacgagcagtacgttccgctggactgtggcttcgacttttacgcacctcagacgatggaggatgcacagggacgacgaatcatggtggcctggatggatacatgggaaacagaaatcccgacacaacagtcccatgcctgggctggagcgatgacgttgccaagacaattgattcgtaggggagaacgattgatattccagcctctttccgaacttatacagtacaggtcggaaggcaccgagcagtatggtatacatttaaatggtgatggacatgatcttgatcttggaatcagtggatactgttacgaactgtatgctgtattcgaagcggaacaggcacaacactttgggttaaagctgcgcacgggtgaggatgaagaaaccgtgatttcctatgatgtagagcagcgtcgtttatgcttgaatcgcgagcaggccggacaagggccgggtggagaacgagctgcaacagtggaactgcttgacgggaaactggaacttcatatctttatggatgtcagctccattgaggtgttcattcagcagggggagcaagtgatgacaggacggatctatcctgggccgaactcaacaggtatcaaggctttctcgtccggaacgtgtacgttgaccgaacttcgcaaatgggatttacggattccccgataaaattctatgtaaaattcagccttgaccttgaagtatacttcaaggtttattctttttttatcaagaaatattggaggctgaataatgagaattttagaatggattttggtattagtaaccgtagctgctacggttctcatgctggtgtttccgaagcgccgggcaatgacaatggggacgctcacagctctggttctgacagtgcttctgcatggcttaatcaattcatttcgcgtgcagatgataccaacctatatcgtcacacttgtattattcattacattaatcattcaagtcatgaaatcataccgcggtgatcgttatgttcagagcgtgcggagacccaaccgtctttcaagaataaaaatgacgctggtatcgatcctggttctggccttcagtgcaggttcaatcatactgacctggctcttacctgcttttacgatgcctgaaccaaccggcacatataccattggcacgttctctcaacacctggtggatgaatctcgcgaagagaccaaaacacccgaggcaggagataagcgcgaacttatgattaatgtgtggtatccggtggatcaaaaaaccgcccaagggctgccgctggagcattaccctagtgaactgggagaagcgatcagtctggtgtttggcattccgtctcaggtgttcagttatctggataccattccaacacatgtggtgcaaggagctgagatgtccgccgtccaaagcaagtatccggttttgctattctcgccgggtatccgctcagcccgttttcagagcatgacgatgattgaggagctggttagccacggttacattgtggtggggatagatcacccttatacgtcagcacaagtgagattccccgatggacgtgcagtctcctatcaggctgaccctgaatttgcaacgtcaggggaactatatcaatataatataaaaggtataggtattcgtgcagaggatgcaagctttgtactggacactctcacacagtggaattcacatgatccgaatcaattgctcgaaggcaagcttgatctggattctgtcggtatctttggtcactcctacggcggtgcaaccacggcggaagcgctggctcaggatgaccgtttcaaagcaggacttagtttggaaggcggtttctggggtaaagtatccacaacagccttgaaacagccgtttatgtatatcatgtcgggtgggacagccaaaagtctggacccggacgccactgccaaggataaagtattttatcccgagtttgagcctgatttggatcgggtgatgtcaaacagtcttaatgatacctattatctgacagtggagaatttatttcatcaaagctttacggatatttcgttaatttcaccaaaaatgtttgccagaggcatgacgccagaacataatgtggatataaccagatcctatgcgctggcattctttgaccgttatctgaaagggaaagagcagccattgctgcaagggtcttcagcacaatttcccgaggccacctatgatgccacatatactaagatacgcaacgaacaaacacaataaatctgcagaaggatggagagtatctatggaaaccatgacaagaggagagctggctaagcgtaccggtgtaagtatggcaaccctccgttattatgaggacagcgggattctgcccgctcccggtcgttcctccaacggataccgggtgtatactgaggattatttggtgaaggttaaatttattaaggatgcccagtcgctgggttactctctaaaggaaatacaggatacgttacagttactcagtcaggaagacatggaaaaggaaacgttaaaaacccttgtacgcgaacgcatcactgacattcagaagcatattgaccatctggaacagctgcagattaatctggcacgactgttgcatacaccggaggacgatatcgacaattatattcaatcgttcagggtgcaaaagaaagagccgtaatcgcggctcttttcctgtttagcagaaaacaggagttgactaacgagcagggaatcggagatttagaaagaatacatagtgtagtttgccaatacataatggtgtttaacgtgatttcaataatttcaataatgaaactcacaccacaaaaggagtaacattttctatgagggatttgcaaggttttgtatccgattacatcaaaggaaagaaacatctgcatcttgagattggcgttattacaaagggagatattgaatatcattcattgggcaatcccaaaaagaagagcgtggcttctcctgaacacaggttgttcgaaatcggctctgtaaccaaagtttttacatcgatccttctgttagaattggaacgtgaacagcagctttctacggatgacacggttggcaagtacatatacaacgctaaaaacgattatttgaataaggttaccttaaaaagtcttgcgacgcatacctctggattacccggagttgccacaaacctgtcctcgaagaaaaatcgatacaatccgtattcaaattatacggaggatgatttacttgcttttttatcggatgctgactttgcggatcagatgggttcattcgagtattccaataccggcgtgggcttactgggctatatcctatgtaaagtatcaggcagtacatatgatgatttgctgaaaaaatatatcacaggtccattaaacatgacggagacagcagctatgctgaatgcagaacagaatggcagatttgtagatggacatacgtcaacggggaaaaagatgcctcactgggatcttagtgtacatgaaggcgcgggggcgatcaagtcatctcttcacgatatgagtttatttgtacaggccaacctgaatgaagatcatccgctagcctctgcaatacaacaaagtcacacgcctgtgatgattggagattcaacccatcattacgcctggtttagtgataacatcttggatcagaatattctctggcataacggggggacatttggttttagcagttatttagccttaaacaaggaacagggtataggcatcgtattattgtccaattattgttttggatcagcctcaattgtggatgagtatctggatgcgatattcaagtttataactaaaaaagacctttatccactcatgccgctggatcctgtgggtaataaaatactggaagccatgatgcagagataaaaaaaacctccaatagagatcacctgaggatgtacttcggcgctctctgttggaggtttttttcgttctatcttaatagtcttgatcatgacatacccgcttcacgcagaaaatggtgcacaatcttcgtctgatacttgatacgggtcgagcgtttcagactccaacagatctccaccgtgacggaacgggcttgtaatactcttgaagccgctgtacgtgcagatcccggcaattcatgctgcttgaggttaaaatgacgatcatgaatggcaatcgaccgattcatccgttcgataactcttctgcaagctggaatcgtcccactgccgggattagtgatcaacgtctgtccaagcacccgtgaactaagctgtgacaggccattggcttcatgcagatcgagccaccagtcgacccgttgttcacgcgccagctgaaaaactgccgcagcgagcggatgcttggccttgcctgacatacgacgtggaaacgtacgattcagatctggcttgcctctgattttcttagcgtaggcttgctggttcacgcgtggcacgataattaacagccctcgctgaatggcgtgacgacctgtcgcaatatcatctgcgagtttttgcgcagcggccatactcgccgtttcattcccgtgaattccggatgtaatgaacatcacgggtcccggcatcatgccacgtacgatgaagtagggagtagcgtgtaggctggatgctagaaggacatgtttggtcacaagcatgacgcttcacctccgttattacagtacgccatgtccctctttcatgtaacggcgtaagaacaggtcttcatcctatttcctcacaaaacgggccgactaatacacccgatgaatgatatcttcaaaatcgggttctttcatctctacatcttcaatctcaccccagtgctccaactgtttcagaatgtccattgtgctccattccttccggttcacttcgacggtgacaatctgtccttccactccagtaatatgtatcgcggacgacacaacatccgggatatgaaacgctcctcggaacgttacccgaatcagcgtaggtagtccgatggtttcgcgaagtgacgaaatcgtgccgtcataggtcagttgaccattgttaatcaccatgacccggctgcataactgctcaatgtcgtccatgtcatgtgtggtcagcaaaatcgttttgccaaacgtttcatttaatgtacgtagaaattgacgaatgttccgctttgcattcacatccagtccgatcgttggttcatcgagaaaaagcagttcgggatcatgcagcatggaagctgcgagatcggcacgcatgcgttgtccaagcgagagcttgcggacaggcgtggcccagaacgattcaaggtccagcagctcggcgaactgggacagtcgtttctttttatcctcggcacgaacgccgtacatctcggccagaatatcatatgaatctttcacgggcagatcccaccagagctgactgcgctgtccaaacacaacgcctagtcgaccaacggtcctgcgcctgtcctgatgcgggttcataccgtcaagccttacctcacccgaggttgggtgcaggatacctgtcagcattttgatcgtggtagacttgccagccccgttcggaccgatgtaacccacaaattcccctgggccgatatcaaaactgatatcgcgtaccgcttccttggtcacatattcacgtgaaaataacgtacgtagaccggagaaacgtccttcgcgaataacaggagttttgaattccttttgcagatgccttgctgtgatcatgttcatgattcgtttcgcctccttagctacctgtactttgatatttggtcatgccaaattgccagaaacgcagacttgcagccaaacttagtacggcaaccgccgcgacagcaacaagaatccacgctcctccttcaccccgtagcaggtaaagtgacggaatgtagttgacgaatcccacgggaatcaccgttagcagaatgccagacatccatttgggatataacgttagcggatattgggcagccgttcgtgcggcatcttcagtgatcgtctgtaattcctcaatacgtgtggtccagaatccgagtgtggcggtagcaagtccgatggaaaagagaatgactgcgcccgtcagaataatgagcagggagaagggaatggcgatccagccaatctgtccgctatgcatcatgcctgccactgaccagcagagaatgaacccgccttgcaggacttccccagccatgatgcggaagttttgcggcagcagtgctagcaatacgggcatgggacgtgttaacagttgatcaagctcaccattaaccagatatttttccagatgatgaacttcgtttccgaacgttcgatacagtgttttggataacgtcatgatggcgaagagataaccgatctcatggagggaccagcctttaattgctccgaatttgtgcagcacgagagcaaccatcagaaactcggagatctgaattaaagcggccagtacggacgccatgatgaaattgaacttgtattgcatccgactgcggatgcttgttcgaatgagcattttatataaattgaaccaggaagttcgcttcatccgccttgtacctccactttacgacgtaacacttgggtgatggcaagacagatcaacgtcataaagacacaccaaagcaaggttccccataacaaggagccatcttcgaaaccaagatagattcgggtaggtacatagagcaggaaagggtagggtgatatccaggcaagttgttcaagccagttcggtagccattccagcggaatgaaaaaaccagccagcagattcatcatcgcgtgattgccccagtgaagccaagaggactccgtggtccacatcgacgtggcaccaatgatgtagttcatacagatggataagtatgcggcgccggcaagaccaagtgcggcatagaatagtgttgaaacgtctgagggccaatgcagggaaaagacaatggagaagagcaggtagatcggaatacttttgtacacgaactggtaggcaatctgcccccattcgcgtgccatcaggtgggtgaacagatgaacaggcctcatcagatccagtgcgatctgccctgtcctgacggataagggaatacccaatccgttcgtgagaaaacccgagatccagagagaggattgcgtgaacgcaatgtaactgatcatcccctgtgtcccgtattctccgagagtatggtcggccccgatgccgatccagaggcaggcatacatgtaaccaaacatggcgcttgccaagttatgtaccatgtgtgccccgcggtattgcagattccgggagtaggctttggaagccagagtgaaataaagcatgtgacacctccgataagtggattgaacggcgtttccgttcacttcagtcaaggcgaaaaagagagaaggacaacagcataccaatttattccttcacaggcaagacatttttttagctaataatggtattaacaggggtgttcatgattgcgccacaagacaacggtctgtccgttcatttataattgagaggtagtatcgcaaacgtttacaatgtgaaatattcaaattttaaataaaccgccgggcttgtgcttgacgattgaagatacagaacgaacaatccggcaagagagaaggatgtcatgaagaaaattgcatgggtcactgatagtaccagtacactggatcccgtttttgcggagcaaaatcatatctacatcgtaccgctgcgcatcgtatttggagaggaatgttaccgggaaaccgatgacattacatctgaaatgttctatgagaaacttgcggaggcttcacgtgcgagcagttcgcagccacccattggcgaattcattgaactgtatgaatcgctcaaagacaagtacgatgagattattacgattcattgctctacagagcttagcggaacgctgcatacgtccatgcaggctgcagagattgcaggagtgacggtgaccgcaattgattcgaaggcaggtgcctatcctcaccgtgagatgattatgcaaggactggaatggcagaagcagggatgttcagctgccgagatcaaagtaaacattgaacaaatgattgataacatgtccttttacctcataccggccagtcttcaacatcttcaccgcagtggccgggtgtcgggcacacagctgatcatcagtcaactgctcaagatccatctgctgcttcgatttgaagagggcaaagtggttgtgaatgagaaaattcgcacgttcaagcggacaaaagagcgcatgctcgatatgctcaagctcgatatggagaaagtaaagcatgtgtgcattatgcatgccaacaatcaggaagaagctgttacaatcaagaagcagattgccaatctgctccctaaattaaagaccgaaatcatgccgtttattcctgtggtaagtatccatgcaggtgcaggaaccattggactgtgctggatacacagcgagaacggatatagagactagacgtataagcactcatctataaactctcatagacctggcaggaaacacacttgatgtcaaagtggtgatcctgtcaggttttttcgtatgtcattgccaattcaaacaaactgtgaggtaataaagaaaactgttcatgttggagggaaacatgtgttaagtcaccgcttgttgcttgttgaagatgatcgttcaattagtgagatggtcgggccatacttggaaaaagagggctacgacgtcacttatgcatatgacggcttagaggcagaacgtcagttcagccagtcacaacccgggtatgatctggttattctggatctgatgctgccccgcaaaagtgggatggatgtgctgcaaaccattcgggcagtcagtctggtacctgtgctcattctgtctgcgaaggatggggaggtggacaaagcgttaggtctgggcttcggtgcagatgattacttgagcaaacctttctcgttaatcgaactgactgcccgcatcaaagctgcgattcgccgcgccaattataccactccgcctgtggctgaagtggctaaagatcagcgtattcacattggaggactcgtagttgacatggagacgtacgaggtggagcgtgaaggtacacccgtcaagctgacatccaaggaatttggaattctgaagctgttggttacccatcctggcaaagtgttcaccaaggcgcagatctacgcttccgtctggaacgatcattattatggagacgaaaatatcattaacgtacatatgcgtcgtctgcgtgagaaactggaggcggacccttcggatccccagtatatcaagacactctggggcatcggatataagctggaggcggagcagggatgacactgatttttgccgtcacgacgggtattctggccattgccatcattgtattgtggttgaaattccggaaaagaaaccaacacctgacttatattcatcagaaaatatccgctattttggatcaaggcacctttgagcgtttgcttgtattcaatagtgatgaccaagtcagtcagcttttgaaagacatgaaccagctgctggatcatgcgcaccgtgctaaggccggttatgcgaaccaggagaaggagatgcgtaatatgctctccaacatttctcatgatctgaaaacgccactcacggttgtgctgggttatagtgagaccttactgcacagcccatcattgaccgatcaggaacggaagatgatgacggagaaaatacaagataaggcgcaggaagtgctgcgtttaatccattccttttttgatctggcgaagctggaatccggagatacggaactggtacttagtcgggtgaatttaagtgaattatgccggttgaagatgctttccttttatgaaatgttgacgaatctggggttgcacgtggagctggagatacctgatggtgatctcttcgtgcaagcgaatgaagaagcattggaccgtgtgctggataatctcattaccaatggaatgaaatatggagcagagggtaaggtactgggactttcacttgatcattcaataggtgcacctgtgacgttacagatctgggatcagggaaaagggattcctgagagcgagcatagccgtgtgtttgaacgcatgtatacactggaggattcccgtaatcgactctatcaaggcagtggcctgggtctgaccattacgaaacggctagttgagcggatgggtggaagtattcacttgcatagtgtgccacatcaacggactgtattctcggttaccttaaaggcttggtagaccctgcgttggcgtgtccggtcagacttaaggtttttgtaagatttgattaataaaaaagaagacttttctctttacaatatagatataggaacccggacaggggacgtaaaggagaacaaggacgatgaattatatcgcacgaacaatagatgtgaccaaagtatatgaaggggtggaggttgtatccaacgtcaatatgaatattaagcaaggtgagatctatggattcctcggtccaaatggtgctggtaaaacaaccatcatgaagatgctcaccaatctcgtcaaaccaaccacaggggagatagaactgtttggggagaagctaacgccgacctcctatgaagtgctgaagcgaatgggcagcattattgaatatccttttttctacgataggctgtctgctcgcgaaaatctggaacttcactgtgaatacatggggtttcacaacaaaaagatcatcgacaatacgatggaaatggtagggctgaaggatacaggcaagaaaccggtcaaggacttctccttgggcatgaagcagaggctgggactggctcgtgcacttataaccacacctgaactgctcattctggatgaaccgatcaacggattggatcctgtagggatccgggagatgcgagatttgttcaagcgccttagcaatgagtatcgcattaccctgctggtttccagtcacatccttggcgagatagagcagattgcggacacagttggtgtcattcgcggcggtcgcttggtggaggaagtatcgatggagagcattcgtggaagtcaaaatgagtacatcgagttacaggcggtggatatccgcaaagcgacctatgtcattgaacaccagcttggtttgagtaattataaactggttgataaccaaacgttacgcatctatgatccgggaatcattccatcggaactgaacaccaagctgattcagcatggcattgagatcgaatcgatatccaaacgggctcattccctggaagaacacttcatgaagcttgtgaaaggggatgaagacgttgcttaaactaatcagacttgagatgcggaagcaccgttttgcacgtaattttgcaggtgcaggtattgccaacatagccattcttcttttcctgattatgattggattcatggatgtgggagcagaagattatgcctatgccgattaccagaccgcctttataattatcgatacatttgtgagagcgaccttcatcatatttgcaggagctttattatccaagctggtgatcagtgagtatcgaaataaaaccatgaacgtcatgttcacctatcccatccagcgtcataaaatcatcgcggccaaattgattatcgtgtttggttttacatttgtgatgattatggttaccgatctgttgatgggttcactgctgttgattgttaatcaattctactccttcattcctgaatcactgagcaatcgggatattttggaacttctggtgaagtacagtatcagttctttatcggctgcgtgtatggcactcattcccctattcttcggtatgcgtaagcattctgttacagcgacaatggtctcgtccattttgctagtttcgattgtctgctccggattcaacgggtcggaagtttccattcattcgcttattattatccctctgacccttggagcaatagggatatggattgcttcgatgtccatggttcgtctggagacaaaagatgtgaactgaatcattcggaaaaccatgctctgtatggcttcagatgccattgacatccgctcgtacaagggataggataatgtcaactgagacacgaaggagaatgcaactaccatgacgattccaaaaacattaacaatagctggttcggacacgagcggcggtgcaggtattcaagctgatttgaaaacttttcaggagctgggtgtgtatggcatgaccgtactgactacggttgtggcaatggagcccgaaacatgggatcaccaggtctttcctgttgaattaaatgtggttgaagcgcagcttcgcacggttctggacggcatcggtttcgatgcaatgaagacaggtatgctcggttctgtagatattattgaactggtagcaaaacatattcgccgcagcggtctgccacagatcgttatcgatccggtaatggtctgcaaaggtacagacgaagtactgcaaccggaaaatacggaagcgatgatcgaattcctgttgccaggtgctgatctggttacacctaatctgttcgaagcatcccaactggcgaagagcggacctattcgctccaaggaacaaatggaagcagcggcagcagcaattcatgcccatggctcgaaacatgttctgatcaaggacagaggtgtcattagcccgggtaaagcaatggatctactctatgatggaaccaactacgaatggtttgaagccgatgttgtcggctccggatatactcatggtgcgggctgcacaacgtctgcggcgattaccgcaggattggctcgtggtctttcagtgaaagaggctgttcgtgaaggtaaagccttcgtgaccaaagcgattgccggcggattcccgctgaaccgttttgttggccctacactgcatgtggcacaccgtctggagcaacaacgttaaagtgttgccagggagcgcgcagtagcgcatcaattctggataacacacttcgatttcattcaagtagctgtcaatgagctggagcttgctcgttgacggcttcttttttatgcgaatttttataaaaattagtaacttttggcttatattaatcgtatatatcatgggagcattccaaaacatgtgtggacacatgaacgacacatggaataggtatgttatcatcagaaatctaaaaggagagtcggccatgatcagaacagtgcttctggtggaagatgaaagccgcattcgtgagattgtggccgattatttcataaaagaacaatggaacgtcatagaagcagaacatggagtacaggcactggaactgttggctctgcatgaggtggatttggttattctggatgttttgatgcctgaaatggatggatggacgttatgtgggcatattcgatcccaatccaccgtacctattatcatgctgactgcacggtccgaggatgacgataaaattcatggatttcagctgggcgtagacgattacgttaccaagccgtttagtccacgtgtgctggttgcacgtgcagagacattaatgaagcgtgttgaaggtgcatttggacgagagcagggtgtgattcgcttcggacaggtaacccttgatccatgggccagacgtctggagaaggacggaattgaagtggaacttgcaccaaaggaatatgatctgttgctttatctggtacgtaatgcaggcattgtgttgtcccgggatgccattttgaatcggatctggggatttgattttgagggggactcacgtgttgtagatacccacatcaagaagctgcggagcaaattgggtgatgaagccaagtgtatccggacggtgattggcactggataccgtttcgaggcagaagcatgagaagaaatggcgtaacgatgaagcttttcctggtcatggcaggatgtctggttcttctatatgggacgacggtttttgcccagttggtctggttccccgacttctatcagcatcaaaaggttagcagtatgaagaaaaagctgtccaagttcgaacagcaatattccaatggacattggagtgatttacagctagccaaggagaccgggaaattcatgcgtcagaatcagtcacatctggtcattctgacgaataaaggaagactggttaatgacccgttccacattacgttgcttcaagaggatggaagtcacgtgaaggtgtccttgtccttgtttatcaatagtgagaatgctggctggattacatcccatctgaaatatgggcaagaactgacggtgaaaggtccggccagcgaatccatggtctatccattcaaaatccaggatgccacttctgccgcatggggaacagaaagctttcaggaatcaattgaaccggtaaaggaatggtcaggcgtattgaccgaggtcgttcttcccaatctggcaacgtggagtcagaggcagggactgctggtgcaagccctggatagtcggttcccgttgtccaccgaagaccaactggccttggcgaatggcaaaatgcttaatgaagaatggatggatagctggagcggtgttcgcaatgtcatcaccattgctccagtgcatcgttccggacccgagcaacaactgatcttttcgctcacctctctacaggagatgagggaagcgaatgaggcaacacgtttgttctatgcgtattttggcataggggcatttatattgattctgttgctggcgttgctcctgtcccgaattataacgaagccgcttttggccttgaaccatgtcgccaagaaaatgtctacgctggatttcacggtgaaatcacccatccggcgtaatgatgagatcgggagtctgtctaacagcctcaatgccttatcgggaaccttgggtcagacactggaagagctgaggcaggccaacacgcagatgcgtacagatatggaaatgaagcaggagattgaacagcgtcagcgcaagttttttgccgatgcatcacatgaacttaagacaccaatcagcattattaagggatattctgaagggctgaaggatggcgtcagtgagagcaaacgggagcgttacattgagatcattgccgatgagacgatcaaaatggaaacgatggttgaagagatgctggatctggtgcgactggaatcctcagcggttcaattgaatacggatgctgttgcactggctgacatgattgaagatatcgctggccgtctgggtccgcaactaaaggacaaaggattggatgtagtgcttgtatccacaacagaacagacggttgagggtgaccgaagcaagctggagcaagttattttcaatatcatgatgaatgctatacgtcatgcgataccacataccgatataactattgagattagcaggcgtgaaggttttgtccatatttccattgaaaacaagggtgagcacattgctgaagctgagcggcagtatatatgggagaggttctatcgggtagagcgctcacgtaatcgtaaaatgggggggaccgggcttggtctggccattgcgaagcagattcttgatctgcatgggtgcagttatggagtggagaatacaccggatggagtccgtttttatattatttttcctaaagcctagtacgaaagggagtcaaatattatgaagtctttaccatcgattttaaccttggggaatctgagttcaggcatgctggcagtcattatggctattcatggtgaatttgccctggctgtgatgatgatatgggtagcgatgttctttgatctgtttgacgggtatgcggctcgtaaattgcattgtgagggtgagttcggcaagtccttggactcgcttgcggatgtagtttcattcggaacagcacccgtgctgattctgtacctgaattccatgattgaagtaagtgtgctggggatggcactgactgcattgtttccgatttgcggggctttgcgtctggcccgttataactgtcagaagacagcaagcagtggttttgtcggaatgccgattacatttgcgggaggtctgatgtcctttttcgcactctggagtccttatttcacacatggtgtagcctatcttgtcattattgtattatccggtctcatggtgagccaaatccgattcccgtctctaaaacaagtgttagcctcacatgagaaggatattgtggaaccgaaataaggagcgagtcagtatggaatttgcaaaagaatttattggtcaatatggttatttcgcaatatacggactactggctctcggcgttattggcatgccgattccggatgaggtgatgatgacttttgtcggttatctcgcctccatctcggtattgaattactccgtatccatcgccgtcagttttggtggcgcatttaccggagggctgcttagttacatgattggcaaaaaagcaggcaggccgctggttgaaaaatacggcaagtgggttggcgttaatgccaaacgattcagcagggtggagtcgtggttcctcaaatatgggtattggtccatcatcctgggttacttcattccaggcattcgtcatctgatgtgttgtttctccgggattagcaagatggcaattggcaggtacgtagttgtatcgggcattggtgcattcgtctggtgtgttgtctttatctcgattggtttttatgttggcgtgttaacttaaaatgggacagcctgttgtaacaacaggcaaggatggaagacctcttgagtgtaaggtggtctttttttgtttttctatatatggtcggagacactccgcagtattctaacgaactcaggcgagcttattatcgagataagaggcatgttggaattctaacgaatctcagcaaccttatttcacgaaaaagcccgaaaaggtgccctgatctactccatatcatcacaatagggtgtcctgagttcgttaaaaaatggatatgtaccatatcggcgaaatagagtgtctcatgttcgtaagatatacgttcgatatcgttgagtgccactagcgacatgtaatacttgttgatcaatcaggctgtgaagaactcttcgagcatgctgatccgtgattcgcaggtgcgttgctagttccgagggggcgaatggacggatgatgcgtctggcataacgaacagcctcagcttctagccaatttaaggatgtgggaacgtccgtagcaatgaattttcccataaaagagagcacaagctgttggcaccgtttcggttcgtctttaatggagagatacgcgatcggtagaaaaatccaatcatcaagcgttagcagacaatgccgccagcataaatctttaaaacgccgtacatccagatcacgggcatgtggcccgtatccctgaatctcaatacctcctttaacgccgttacctggcatgtatgctagatccagataccgatagccgttatgaaagtctcgaacttcccattcgggttgcaaatgattaaagtttttcatcaccggaaaccagactgaacgcaaaaattctaacgtgccatgttcaagtccattttctagtctggacagcactctggggttcgtttccttctccagaagggagtgcatccaaacttcgtaagcctcatcaaaatcaatgctcatcgtcttcatctcctctaaaaataaaataaacgaacgtgaacaggcttcaggtcgtcatgtcaaaatacaaaaagccgctctgatcatttccaaccttcgcgttgaaggggagaatggatcaaagcggcgtgtgcttcacgaccgatatattgcatttataaatcaagtatagctttaaatatggaatgatttcaataccttttccaatagaggatatttcaagccaaggtctgaacgccagaacgagactggacgtattccgagctagtaggtgctacactttaaatgtgtgagaacgcgtcccttaatgtgcgagtaagcgatatagacgctgtaaaagtagattattctcgccttcaaggctgtttacatttaaattaagttcttcgtaccgcgggtatgcgtcttctcttgctcatgcttggaaagaagcgtagagcgggcaataagagctaaggaatctgagacgtcttattcatggagttgaagcactcgcagaaatgtaaggaacctgagaaacgttatttcggaatgtacagccattttcagcgttttgttatgaaaatttgggaaataaggtgtctgatgtttcttacaattgaaaaagagagccagaggaccaaataagacgtactgggttccttagaaaaaatgaagggttattcttaaggcgcagccggcctacatttcaggaattttacgcccgttgatgcttcaagacagtgttagtatgagtgacgactggatgccttgggtgtgccaaatgcgaaaagctaaaagtgcagcatatcatcaagacacagcttacctgagtcgcaagacactcatagtaattctagggacacaactgaagtctagagttcagagtgccacaatggaatctttattgttaagttttgaactgagacatacctcacccactcaaatgagattcttcaattcctctttcgacttgcttttcccctttcttgcgtgcaaaggtgattttgaggagtggtggagtaaccagtgtagtaacaataaccatgatcacaacgctggtaaaatactccgaatcaagcaatccggaagcaagtcccgttgaagcgataatcaaggcaacctcacctcttgatatcattcctgagccaatggccaatgaagatgacatattaaatccggtcagtcgtgcaccagctccaccaccgataagtttggtaacaatggcgataagactgataacgacaataaaccaaatttgtgaacccacgccatcaaaggtgacatttaagccaatacttacaaagaacactggaacaaaaattccgtaggcgattggttccagcttggtttcgacttcatgtttgaagttggtttgggagatggcgatgccagcggcaaatgctccaatgattccagcaacacccatccactctgcaaagtaggagaagccaaaacaaataattagtcccgcagtaatgacggtttcggttactttcagtggtgccatccacttcatgatgcgtggaacaaggaaccagctagcagcgatgatgatcacaaagaataacagcttcttgccgataagcagagaaatcgaagtgtctcctccaccagtacccagcaagctcatcataacggcaagaatgacaacgaccaggacatcatctacgacagctgcaccaaggatggttgtaccctcacgagagctgagttgatccatatccttcaacgtctgaaccgatatactgacggaagtagcacagaataaaagtccaaagaacagcgcgtgtgtctgtgacataccaaatgctatggccgaaccgtacccgccgataaaaggcaaaataataccgccgaccgctacggcaaaggccgccttccagtttttctttaactgctccagatcggtttccagtccggcaatgaacattaacagcaataccccgatctcagccatataatgcacgaaatcactttgctgaacccaaccgagaattgcaggcccgaggatgacacccacaatcagtttccccagaaccgatggttgacccaatcttacggatagatcaccagcaagtttggtaaagattaaaataagtgcaagaaccaaaataaattccataggtgtactcccctccagtagtagcgtctataggttaaccagcccaagggcgatccatcctccgcttcaaaaagacaaaaaggcacagaaaggcattaagaaagtgccgttctgtgcctgaaaaaagacaaagaggggcccttggtgacaggctcctccagttttcaacgcgtatgtgattaattgcattaattataccacaaatacggactcgggtaaatgggagccggtttggatttgattgaaaacggccataaaggggcattttatagtggggcgcagcggcttttgttcagagtgttgtcacttaacagcccggaattgccgagatataatgatatagaacatagatgttaggatatgaggaggattttgcattgggtaaaaataacaaaagggaaccgaacattccatccccgacgagtaataaaaatttcgcaggcatcattatcacgatttccattctcgctaatgtcattattttattattgttcttcgcaccgtcgattggttacaaaggtgatgtaacctttgatattacggtgttgccgcggtttaatgccgtgtttaacagctttaccttcatcttcctgctcgcagcgcttattgctatcatcaagcggaatgtgaagctgcacaaacgatttattcttgctgcattctcaacaacactgttattcctcgtgacctatctgacgtttcattacctctcaccagagacgtccaaatacggcggcgagggcatcattcgttcgatctatttcttcattctgattacccatagtatactggcagccctgattgttccattggcgttgttcacacttgtgtggggttggacgaatcaattgaagaaacaccgcaaaattgcacgttggacgatgccaatctggctgtacgtcagttctacaggtgtcgtagtatacctgatgatggcaccatattattaatgtgatgaacgtttcactgtgctaattagtttgacttgtgggtaatgtttccatggaaggagggttcacgtttatgtacagagttgttttgattcgccatggacagagcatgtggaatgtagagaatcgttttaccggatggactgatgtggatctgacgacggatggttacgcagaagcacgtaaagcagggaagatcatgaaggaacagggatttgattttgattacgcctatgcatccgtgctgaaacgttctatccgaacactcgatattgcgctggatgaaatggacctcatgtggattcccattacgaagacttggaagctgaatgaacgccattatggtgcgctgcaaggactgaacaaacagcagactgctctgaagtatggggaagaccaagtaaaggaatggagacgatccgtgaacgtatctcccccggcactggacgaaaccgatgaccgatatgtgcaggatctggacaagtacaagcggctcggatgcaccatcccttttacggagaacctgatggatacctcgaagcgtgtactggagtactggaatgcggagattaaaccgatggtgtcggctggcaaaagagtgctgatctctgcgcatgggaacacgctccgttcactcgtcatgcatctggaccaattgtccgaagcagacgtgatggcgctcaatgtcccaacgggcattccgcttgtctacgaattggatgaagatctgcatcccatcggacacttttatctgaccgcggatggttctacctacaaacatgaagaaatgacccatgtggcaacgccatctgattaattggacatggacgtttgtcttgattgtacgaaagcttgtatgatttatctcgtgcggttgatgtttcaacaggacgattggaagatgaccgctgaattgaattcggaggtcatctttttttctgcgatcaagcctgtacttcgtttcgttttgctcccacagggtaattgtcaagcaagacacgatgtacatttatcctgaaggaggagaagcacatgtctaaaagaagaggaatactcatgacggctatcggcgcaggtgtgacttatctgatgaggaacaaacaagcaagagataagctgtttagcactgtctcgggtatgatgaaaaactccaattcatccaatgtaacaagtaaaaccagaccacgtgtggaagtgaaatagattgcgatagttcatttatcgttgaattaaaaggatgatcatgagaaacctggagatgaagtcgttccaggtttttttgtgcaatcaaaagcaattccttgcttttgtgtgtaatgcgatttttggcagcaagaatgatacaatggatacttgcaggacgtatggagggagatgcacatatgaagaaaaatcgtctgggtacatccgaactgatggtgtctgagattgggctgggatgtatgtcacttggaactgaaatggagcacgctgtgggcctggttcatgaggctctggatcatggggtcaatctgttggatacagccgatctgtatgacgaagggcgtaatgaagagattgtaggacaagctattaaagggcgtcgggaccaagtcattgtggcgaccaaagtaggtaatcgtcgtctgcctggcaaagagggctggtcatgggacccgtccaaagcctacattaagcaggctgtacatgaaagtctgaagcgtctgcagaccgattacatcgatctgtatcagctacatggcgggaccttggacgaccccatcgaagagacgatcgaagcgtttgaggaactgaagaaggaaggacttatccgatattacggaatttcctccattcgtcccaatgtgattcgggagtatgtaaagagggcagccatcgtcagtgtgatgaaccagtacagcattgctgaccgcagagcggaagaagaagtgctgcctttattggaacaaaaggggatcagcgtaattgcccgtgggcccgtagctagcggtgtgcttgccgattccggatctgccaaggcagacaaaggttatctggactacacgccagagcaactatataccattcggcaagggctaagtcgtcttgttacggaccaacgcagtatggctcagacagctattcgctacgcgttatcccatcctgccgtagcagctgttgtccctggtgccagttcaagagaacagttgttgcataatattgctgcttcgaattcgcctgaactcacccctgcggaaattcaggaaatacgagaactcagtcccgctaatctgtacaagcagcatcgttaactccattaagcctattttcaattgtaactatacgaggtacaatgaagatcagccaaaaaaggaacatataagggagagaagacatatggaaagaattcaaagtgaacagcaatatttggatacaattaactctgatggttttaccgtcattaaatttgatacaacctggtgtccggattgcaaaaacctggatcgttttatcggggatgttatcgaccaacatacggacaaaaccttctatgccctggatgcagaaaagttccagccgtttgccgaagagaatggtgtacgcggcattccgagcctgctcgtcttccagaacggcaagaaaatcgcacatctgcatagcaaatgggctaaaacacctgctcaaatctccgagtatctggagacgcttgaatccaaagtttaagcgtacgagactcagcagttagtctaattaatttagctaaggagacctcttcttgtcctgcgacaggaaggggtttttctgtttcattccagcacgcatgatgtgcattcaaatgtgcattcgaataactgaaattgagaaacaacgcttgtttagaatttgttcagtgctcccatgtatactgtgagaacaaactgaatatttggagtgaacaagatccgtatgaagaatgaaatctttgaagaaatgcaccaattaagtcacaatgatgaccgaagataccgattgttgatgattggagtgaaacaactgctgcaggaacaaaaggagaatagatataatctgcgtgagagattgaagaatcgaaagaaacaccggaactttcaagtaaaagagtggtattagacaggctgcttttcagaagtgaacataaatatggatgtccatcatacataataaacctagtcggcatcacgaatgatccaacccactaaagaaggaagtaatgaagaatcagacttcttctaattacgggtattgctgtctctgaagcagcaacagaattgtgaagcaacagaaacatgaagtaacggaagtatagcaatataaaatatggcggcctcgcttcccaagggaacgtgaggccgccattgattttgcctgtctaattacttgaattgtaatgattacatcaaaataataaagaacacggctgccaagacaaagcgatacacagcaaagacggtcaggctcaattttttcaaaatggagaggaacgtcttgatcgcaagcatggcgacgatgaaagcagcgatgaatccaatcgcaaagattgggaaatcactgccgttcaggtgatcgatacttttgtacaggtcatatcccgtagcaccaatcataattggcacagacacgaggaatgtgaactccgcagcggctacacggcttacccctgcaaagagaccgcctgagatcgttgacccggaacgggagaagcctggccacaacgccaagatctgaaatatacccaccgcgaatgcctgtttgtaggaaatatcatcgacatcatgggtagtaatccgcccactcttccggctccagcgttcggctacgatcatcaatataccacctataacgaggctgtacagcactgtttccggaccaaacaaatgtgctttgatccagtcgcggaatacaagtccgatgactacggcaggaaccatcgccaggaaaatatgtcccagattgaggcggcgggagtaaggcctgctccctccggtgaagcggaacatatcaatgaatttgttccaatacagtacaacaacagcaagtacagctccgagttgaacaaccacctcaaacgttttgactgactcgttgtcctccgataaacccagcaaatgggcagtcagaatcatgtgtccagtagaggacacgggcaaaaactcagtcaaaccttcgatgatgcccataataatggatgatataatgtccaattctcttcctccttgaaatgcaggtgacagcgcaggctgtcctgcttgaccatgcctgttcatttgaacaaggctatcacctattatgatcacaaatgcactcaacttcaacttatgcttgtaaccatttgtttaaaactatattgacaaaaacctagttatcccataggatataacttaactgactgactgatcaatcgggagggttacatgaatgaccaaaattaacggtttggaacccggtgaagaacgccgggaccaaataatacgcatagcgatggaacgttttgcaacccaaggttaccatcagacgaaaatttccgatatcgtccgcgaggctggtgtggcgcaagggacattctactggcacttcaagagtaaagaagccattgcttcggagattgtcttaacgggcaaggagaagttacttgagtcgattggacaagggtaccgcaaggatgccggatcagtagaggatatggtgaaagcatcagaaaggctgttcactgacttgtttttgtttgccgcgcagaatcgttattttatggaactgttgctcaaaggcatcgtgacggaagagtccgtacaacgcctggtcgaggagacacgtaatgccgtggaaactgcttttcgtcacaatatggaacgtgccatcgaactcggcatgttgcctaagggcatggatgttccacttcgagcagccctattggtaagcatgattgaaggcatgatatcacgctggttgttcggttccgatgagttacacagcaaattttcagccatgacagcttcatcgctggcaactgaagcagcaagctttgagttttacggactattgggcacataagattcacatgattaaacaaatagcagggaataatgggtacaactgcggtttagtcacaataaagtaacccaatgtacatccagattaatacacgactgagaggaagttaacgtaatgaacaacacatatggatcgaaaactcgtaaaggctggtctttgacagcaattctgctgatgaccgtgctggtacttagtgcttgtggaagtaaagcagcagacaatggaagtacaaatggtgcacaggcaagcaatgaactggagcaaatcaagtctgctggcgttatcaaagtgggcatgatgggcacatacgcaccgtacaacttcctgaacgataagaaagaaatggacggctatgatgccgatatcgcacgtgaagttgcgaagcgtctgggtgtagaggttgaatttgtatcccaagagttctccggtctgacaccaagtctgcaagcgaagaagcttgatgccattatcagccagatgacgattaccgatgatcgtaagaaagtactggatttcagtgatccgtatattacgaaccaagttaaaattattgtaaaagaagacaataacgatattaccaagctggaagacttcaaaggtaagacgattggcgtaggtctgggtacaaatgatgaatcatatctgcgtaatgaagtgttgccaaaagtgggagacttcacgattaaaacctatgacgatgtcatctcttcactcaaagatctgaatgctgggcggattgatgcaacaatcaacaatatgtacgctctgaaaccgattgtggatgccaacggattgaaaatcaaagctgtaggtgaagcaattaagagtgaccaggcaggtattgctgttcgcaaagacaatccggaacttgtagcagcattaaatgatgctctcaaaggcatgaaagatgatggcacgtacaataccattttcaaaaaatggtttggtgaagagcctgcgcaataatgaacctgcaaggcgaagggaagatttgacccatggaactggtatttgagaatatccccttctttctgaagggggcttattatacgctgtatgtaactgtgatctccatgttttttgcgttcatcatcggagtgcttgttgcgattgctcgtctgaagggaccgatgtggcttaggttgatcgcaaggttttatgtatccatcatgcggggaaccccgctgctggtgcaattattcgttatttattacggattggtcgattatggagtgaccttaggatcgctcaccgcagcgtgtctgggactgagtctgaatgcaggtgcgtttctatcggagacgttccgtggagccattcaggctgtgcctaaaggacagactgaagctgcatatgcaacgggaatgaccccggctcaagcgatgagacggattatcttcccgcaggctgtgcgcattgcgattccgccgatggggaacacgtttattggcatgttgaaggaaacatcacttgtggcggcgattggtgttaccgagttgttgcgttcagcacaactgctggtatcccaatatgcattgaatatgcctttttatctggccatcggtgtgatctactggattatgagtatcggcttctcggccattcttgaacaagtggagcgccggttggcccgggcttactgatgggaggagagaaccgatgattacaacaactggacttaccaaacgttttcagcaaaatgaagtacttacgaacatcgatcttcatgtcgatgccaaagatattgttgtattgctcggcccaagtggttcaggcaagagtaccttgctgcgctgtctgaatggactcgaagagttgtccggaggacagatcgaagtgaacggcattgtggtcaacagcgcagatccgctgcgagtccaacgtgcccgggtactggagattcgtcgccagactggcatggtattccagcaatttaatctgtatccgcacaagacagtgctgggtaatgtgatagaaggtcttgttacggtgaaaaaaatcaaaagggacgaggcggctgaacgcggccggattcttctggatcgggtcggcttgtcggacaagcaggatgcgtatccatcccgattgtccggtggacaacagcagcgggtcgccattgcgcgtgcactcgcgatggagccggaagtgatgctgtttgatgagccaacttcagctcttgatcctgaattggtcggagaagtgctttccgtcatgaaggaactggcagaggaaggcatgacgatgctggttgtgacacatgaattgaagtttgcccgtaatgtggcgaacaaaatcgtctttatggcggacgggtcaattgtggaagaagcaagtccacaagccttttttgaacatccaacgcaagaacgcacccgtcgtttcttgcaacaaattactgaattttgatgaagataacagcgatcggaagaacgaacgtactcggagcggatatttaaggtcatgaacgatatcagttcaactaaactttttgcacaagaacggagaggacagaagaaacctgaagaagcggagcgtgcgcctttatcccctgattttacccttgaagaaggaagaaaaaaatctggggataacagcgatcggaaggttattctgtcatcggagtggcaagtgcaaacctttttcgcttgaacttaaactattgtaagaaagaaggataacatcatgaatgtaacaaccgtatggaaaggcaaacgtgcgtttacttccgaaggaccctctggctacgccgttggcatggatgccactgctgcttatggtggtgacagcaagggtgcgaccccgatggaattgttactggcgggtctcgggggctgtatgggaatcgatattacgatgattctggacgctttcctggacaaaattgagtcgattgagattgaagcgcaaggcacacgcagtgaagagatgcccaaaggcttcacatccattgatctgatcttcaaagtcgatggcgatatcccggattatcgcatctggaaagccatccagatggctgaggaaaaatattgtgcagtttccgcttcgctgagcgccgatattcatcctaaactgatcctcaatggggtaagtacacctcgtccttaataacacacgaacagattctatactaagcaggcacttccaatcgcgggagtgcctttttttactgttctaacacttcaacagggattccgcccatctaggagtcactaaccttctgtcagcagaaataattcggtaagcccggtcgccatgttaatggcggcctcttctactagaggtaggttggcttgcagcctggcaatatagtacccattgcaatgacaatccgaattctgacggttatgtggtatgattaattctgaggacagaacatcctgatcctgctgtttatatgtaagcgcttatacagatgacggaaggtgcagacatgttgaaaaggttgatacgaactactaataatctcaaattaaagcataaattgctcatttcctatgtactagttgtcatgattccggtcctgattgttggtcttgctgtgaccagttactttcgccagcaagccctggacaacgcgataggacagacgatcatcaatgtggacaagatcaagagccagacggcaaccatgctacgtgtaccaaccgatatatccaatcttttaatgtttaatgcggatcttaaggagatcgtgaataagcggtacaagagtgttgtggagttaacttcagcgtatcttgcatacaaagactttcaggagtacaggcgtttgtaccgtgagatagcgggcattcgtttttactcaactaacccaacattgatcaacaacctcgaattcatcccagtagacaaacagacggaagagagctactggtaccaacaggcactgaaaacaaccagcatcgggtggttctacattccggacaaggaagataatcctgtacacaagctcagcctggtgcgcaaagtaccttttgccgagtatcggacagaaggcgtgttgatgattgtgatcaatcaggatgagctgaatggattgttgcgtcaggaacagtttgagacgatgattacggacgagcagggttatgtggttgcagccaagaataccgagctggtgggtaaaacgctggatgagcttgattttggcgttgatctgcagaatcaggcgaaaggcaccatagagggggatttccgaggggaaccatctaatattgttattgatgagctgggccctggatcgagtatgaacagcctgaaggtgatttcggtttttgccaccaaaaatatcgtcaaagacgctaacaccgtcagcttgatcggcatgattttcattatccttgtgctggttatcgccctattattcgtatatatcatctcgttcctcacttcgaatcgattgctccggctgagtaaacacctcaacaagctggcattaggagacctgaacgtgacttcacggattgatggaaacgatgagattgggcaactgtcacgacagttcaactatatggtgaaaagtatcaatgaactcatgacgcaggtggtagaagcgaccgaacagaacaatcaattggaaatcgcccaaaaagagattaaattgaaaatgatggcgagccagatcaatcctcatttcttgtttaatgcactggagtccattcggatgaaagcgcatatcaagggagaagcagagattgccaacatcgtcaggctgttgggcaagctaatgcgcaagagtctggagattggcagtggaaaaacaaccttccgggctgaacttgaaatggtacgttcctatttggaaattcagaaatttcgttacggcgaccgccttgcattccagatccatatcgatcccgaggtggagaagatgtacattccgcctttgattattcaacctctggttgagaatgcgattgtccatggtctggagaacaaagagggcacagttcgtgttcatataagtattcgtttagtagagaacattgtgcagatccgtgtggatgacaatggtgcaggcataacgccagaacgactggctgaggtgatgcagtttatctgtggaccggaggaacaggagaagagtcggatcggcatgcgtaatgtacatcaacgcttaaccttgacgtacggggagccatatgggttacagattaagagtgtatatggggaaggaacagaggtttctttcactttgccagcaggaggggaccaacatgtataaagtgtttttggtggatgacgaaccgagcatacgtgagggactgacaaccattatcgagtgggaaaaatacggattccaggttatcgctacagctgccagcgggcgtgaggccatctcccgttttgaggaattggagcctgatctgacgattattgatattcgcatgcccggtatgaccgggctggatgtgattgaagaagtgcgccggaatcatccggattcgcactttttgatattaagtggttacgcggattttgattatgccaaaaaagccatcagttttggtgtggatggttatctgctcaaaccggtggatgaagaagagattattggtgaactggagcgtattgctacaatcctgacccgtgaacgggagacaatggcacgtcatgctggtgaagataccgtctttagggagcatcagatcgaggctttgctctttgacagtctggaaggtgcgggtagcatggaagaagatagcctggggctgcactggcctcactatcagattgtgctgcttgagatgcatgtaacccccgacctgcaacggggaagtgttatgaaacgcaaactgattgaagcatttgaccataaagaccgaggcattgtattctcgttccattctggtctggggctgttaagtaaggaaataatcacatccgagtcatctgcaagaaatctgtatgatgagctggaagggctgctgggagaatgggaggttcacatgtacggtgctgcgggagaacctgtgcattccacttctgaaattgcgcggtcatacacgcaggcgaatcgtctactcggggaacgcttcttgttcacggagcaacgcatcattctgtggactgaaggtagcgcaagcgaaagccttgttaagccagaagttggagctgtggacggagcacatgagccagttgaagacgaactcgcggacaagctgtattatgcgttagacatccgcagtagtgagtccgttatgcgggtgctgggtgagatggaagagcgcctggttccatatcaccgaacagagcaagcgatcaagacggcgttctcacaggtattttccctggcgttcaacaaacttgcagcgacgaatcaacatatgcactccattatgcaggaacattcggttctgattaatgaagtctatcatcaatttacgatgtctgatctcaaagtcatggcatcggaacatttgaatcgacttattcaacgtatgggtgggggaagcaaggatactgtattgaaacagattattgaatttatccagcgtaaccctggcgaaaatctcaagctcgaagtactggcagaagtgtttaactataacagtagttacttgggtaagttgttcaagaatcatactggagagtatttcaatgcatttctggacaaggttcgtatggaaaaagccaaggaattgctggatgaaggactaaaggtccatcaggtcgcggctagagtggggtatgcaaatgtggactacttccacggtaagttcaagaagtatgtaggggaatccccttccgcttacaaacaggccagaacccaatcatcaattaaaggaacggctacggatataaacgaggaataagtatgaagtgctgggctttgcccctgcctattgtgtaaaacgttttcgatattcctgagaaatttccagattcatcatattgtccatgcacttcccatgataagcaatggtcaccgaatgcttcacattttagactggatttactagaatccagatgaagggatggctatacgatatgaatttgtctgatataggcgctgtacgtcatacattgaacttaaatggaacatggcagttttgtttggatctggagtccgatatactcgttgaacaagagatattaccgccttcacagtgtaaaaatacatcatgggagaccattcagattcccggttcatgggaagagcaaggatacggagatgagcctgaatacgaaaggctcgatacctggaccaaggtacgcgagtatgaaggctcagcctggtatgctcaggatgttcatgttccatcagacgatcccggatgccactatgtattcagattggaaggtgtccgatggacaacgcatctctggatcaatggacagtatgccgggcagcaggatagtcttgtgaatcaacagaagtgggatgttacctctctggtgaagcagggagaagtgaatcgtgtagagatccgcgtggataatacgatgaaacttccgctggcgggtagccatattcattcattgcatacggccacagcctggggtggaatcacgggtggtgtttatctggacagtctgcccccatgccgattacagacgttacgtattcaaccagatgctgagaacggaaccattctggttgattgtactgtaagcgctcccgcagatgattccgctagatcgatgcaattacatgtggatatccagcaaccggacggcacatggcttgatcgatatagttgtcatgtggatataagctcagtaggtgtaaatgaaagcaacgctttaatagatcagtggcgattggaacttgggacaggaaagtctgtcgcaagatggtcagatgaatcccctgaattatacaaggcagtgatccgtctgcatgacggtgaacgggaactggatcggctggagcaatcatttggtgtacgctcctttgcaacaaacgggaagcagcttgagttgaatgggacaccagtatatttgcgtggatacgtcgattgctgtatctttccactgacgggttatcccgtctgggacaaggagcattatcttcagcaatttcgaatcgccagatcgtatggcttcaatcatgtccgactgcatgggtggagcgcgccggagcctttctgggatgctgctgatgaagcaggcatgctggtgcaggcagaacttccccattggtctcgtttctttgagcagtcggatcagtctgcgccagctgaagtattgtcctatctgacacaagaactggacgggttgcttcagtcgctgcatagacatccttcattcgtcatgttctccatggggaatgaactcattggtccgaatggccaccctgaactcaatgcattggtctcaagggcaaaggatatggacccgacccggttatatacggacaatacaggttttggacagcttccggcgcaagggcgggaaggtgattattatattcagtcgttgaactggcatcccccgttggaatccgcatattctgctgtgccggataccacgctggactatcatgcagtcactcggctcgcggagcatcccgtcattgggcacgaacatgcacagtacaccatgtatgtgcggccccaagagcgagcgaagtatactggcgtattgcgtcctagctggttacgaccgatcgaagaatcgttaacaaacaaaggcatgatcgaggacttggagcattttcaacaggtcagtggtacccatctggtacgttccttaaaagaagccatggagcggattcggcgaacaccagacgctgcgggcgtacaacttctggacattcgcgattttccaggacagggacatgctacgacgggcattctggatgtattttgggacgacaaaggcattacaacaccagaagaattcatgtgtttcaacgctgatgtggtgctgttgttaagctgcaaagagcgtacattttacgccggagaacccattcatgtcgatgtacgtctctctcactacggtaaggagccgcttgaggacgcggtcattcagtggagattaataagcgatgatgtgatacttactgaaggggaatggaagaccggagatatccaatgtgggtctgtcatgtcactgggaagcatcgtcgctaccgctcctcatgaaggggcagtagcttttcggatcgaagcggagctgatatcaggcgattcggaaagaactgtagcgaatgtatggcatggctggtcgtttcctttttacgagtctcatccgggttcgagtcggttctggaataccatggcagagttgaagccattcctgggtgaagcgcatgatgattgcgtagatcgcatcgatggatttcagttgttgaaaaatcgggagattgacttggttatcgttcagtcgttaacacccaatgtcgttgattatgtggtcaacgggggaagtgtttggctacaggcaaccgcagaagggttatatgattcagtggagaccaagtatctgcctgtattctggaattacctgatgtttgctaatcagcctggtgcaacgatgggcatgtatttgagagatcagctagcactactagcctccttcccgcatgatggggcttcggactggcattggtatcacttggtgaacggtacaccagcgatatgtttggatacgttgcctggggtggagccgctgattgaagtggtggaccatttccatcgggccaaacgacttgcttatgcctttgaggcaaaagtagggaagggaaagattttgatatcctcacttccgtttgccaatctggctgtaatgaagcgtccggaagccgcctatttctttcaggagatacttgcctatctgaatggagatcaattccgtccagcaacctccatatccgtagcgcaattactcggcatcgttaaactgcaaaccattcaatttacattgtaatcagagggacccgaaagggtcctttttgtatgccatgtaattgaagtaaacgattactataaaacgttttcgatatttaccactttcaatagtattttaccttaatattacttttatatcatttgaaagtataatttatcactgattttaacaaattaatgtctgattatatatgtctatatctaatttttatatgattttctctaaaatccagatggtattttgaaaacgctctatcgagtatgattattttataaaacagaggagggggaacggagatggaaacgctaacaaaaaaatccgcttccgcgaacagaagcagtgaccccaaaccgcctttaaagaatcggcggaacggaatttgggacagaatgaaacagcagaaatatctctatctcatgtcattgccattcgtagcttgggttttcgtatttaactatctgccactatggggatggacgatggctttccaaaattataaacctgccagatcgtttggtgatcaagagtgggttggttttaaacactttgtagaactgttcagtgatgatcgtttctatctggtacttcgaaatacgcttgcaatgagtttgatgggactggttgtcggttttatagtaccgatattcttcgctattctcctgaatgaaatgagaggcatgttcttcaaacgtgccgtgcaaacggtatcatatctgcctcactttgtatcctgggttgttgtagccgggatcattacgaagatgctctccaccgatggagggattatcaatgatctattggtaggactgaacattatcgatcagccgatccaattcatggccaaggggaacttgttctggtacattgtaaccgcttcagatatgtggaaggaaaccggttggaatgccatcatctatctggcggcgattacaggtatcgacaatgagttgtatgaagcttcccgtgtagatggagccaaccgctggagacagatgtggcatattacgctgcctggcatacggaccacgatttctgtacttttcatcatgtcgattggacatctgatcagtatcggtttcgagaagcagttcttgcttggcaacagtctggtcacagactactcggaagtacttgatctatacgcgctcaattatggtttgaatatgggacgattctcgtatggtacagccataggtatattcaactccgttgtcagtatcatccttctgtttactgcgaacggcttgttcaaaaaattcacaaaagaaagcatcatgtagggaggggacgacattatggcgaacaaagcattcaatgctactcggggcgataaactgttcgatatattcaacatcctcgcgatgaccatggtgctggttgtaacactttatccattccttaacgtactagccatctcactcaataactcgacagatactgtacgtggcggaatttacttgtggcctcgcgaattcacattacagaactacaaaacgattttccaatatgatggattgttacaaggtttgcagatctccattctgcgtacacttgtaggtaccgtgctcggattgatcagttcatccatgatcgcctttacactgagcagacctgattttggacttagaaaatttgtttccacaacgctcgcgctcacgatgtatttctccggtggtctgattccggtgtacattctgatgcgtgacttgaacctgatcggtacattctgggtatatgtattgcctggcatgatcagtgcatttaacgtgttcattatccgttcattcattgatggcctgccatactcattgcaggaatccgcgaagctggacggagcgaatgactttacaatctattacagaatcatcttgccactgtgtaaaccagtgcttgctaccatcgcattgttcctggctgtaggtcaatggaatgcgtggtttgatacgtacctgtataatggttcaaaggcacatttgaccacgctccaatatgagctgatgaaagtattgcaaagtacacagcagggctcaggtgctggacgaaatgccaatgatatggcgcagcaaatgacacagatttcaccggaatcgatcaaaatggcgattacgatcgttgtaacggttccaatcctcattgtatatccattccttcagaagtactttgttggtggtatgacactgggcgcagtaaaaggttaaacaagtgggtacaggctgccacatagagcggccgtacatctacaaatgaagcatcaggatacccgaagcgcagccatttggtctgcgcttcaccgtatagggctgcggtgtggtattcatgaagctatagacagggacaaaaaagtcccggacaaacagacatatgaaacagggaggattaccattatggcaagttccaaaatgaagattgcactggcaccagtgcttgcaatgtctttactcgcaggttgcggtggaggaagcggcagtgatacgtcgttcaaggatacaagcgcagagacaactccacttacttttgatttcttcagcgttgaccccagtccgaactggaatggcatgaaggatgaagtaggtaaagtccttacggaaaaaacagggataactcttaacggtgaatttgctgttagtggtggtcaagataaaatatccttaatggcggcgagcggagactatccggatattgtctcccccaaaggagaactcagcaaactggtggatgccggagcaatgctcgatctgacagatctgatcgaccaatatgctcccaatctgaagaagctgtatggtaattacatggaccggttgaaatacagtaatgaagatcaggctatttatgtgctgccaacgtattatgcggtagaccaaaagtattttgatgcaggtggtggatttggcattcagcaccgtgtactgaaagaactcggatacccggaagtgcgtacacttgaggattacgagaatgtattgaaggagtacaaagaaaaacacccaacgattgatggtcagccaacgatcccgttaacactggacgcggatgattggagaatcatgattactgtaacgaaccctgccttccaggcaacaggagctccggatgatggtgaatactacatcgatccagagacgtatgaagcaagtctgcattacaaacgtccagaggaaaaagagtacttccgctggttgaaccatatgtacaacactggattgctggatcaggacagctttatccagaaaacagaccaatacaaatccaaaattgcaagtggacgtgttctgggtgtcattgaccaggattggggttattccgatgcagaaaatgcattgaaatccgctggtaagactgaagcaacgtattcacactttccagtaaccctgtccgaggatatcaaggatcatgcctaccaagaccctggttttgtatccggttggggtgtagggattacaacatcgaatcctgacccggttcgtacgatcaaattcttcgattacctggcttctgaagaagggcaagtgctgatgaactggggaattgagggcaaacagtatgaagtgaaggacggcaaacgtgtcattcctgccgacattctggatcagaaaaccaataatgcagctgtattccagaaagaaacgggtatcggactgtacaccaatatgtccggtcactatggagacggtgtgaaggattcaacggataactactacactacgaatttccctgaacagatcgttgcagcatattccgatgcagagaaagaaacactcaaagcttacggtgctacgacgtggaaagatctgttcccgagtgaagatgagttcccaatcaaaccatggggagcagcatacaatctgccaacaccaggtgactccaactacaacgtcatcttcaagaaaacacaggatatcatccggaagcgtatcccggaagccattctgagtactcctgaacagttcgatgcgatctatgacggcatgattacagaagtgaaccaagcaggcgcagaggatatggagaaacaatacacagaactcgttcaaaaccgtgttcaattgtggagcggtgaagaagctaaataaacgattagcaattcagatctaaaacgaaaaagaacccagaatatttgggttctttttttatctaaaacgttttctaaaaaacgttttcaattttataaattcactattgacaagggatataggagagattattattcaagtatgaaagcacttacattcgcttgtacaacacgtgccatacacctgaatctcaaagtaaacatttgcagaatgaagaggaagtaaagcaagagaagaacatttgtttatttttaagaaaacgcttctaatgttataaaaacaagaaaattacatttgtttcatctggttacggtatttgcaggtcagcctgttatacaaatatacagcttcattaatatccataagggggattacacatgaagggcaaaacaccaaaaacattcgcaatgcttctgttagccagtgctcttgcaattacagcaggatgcagcggcagtggaggaggaactaacgcttcagagaaaccggttgattccggagatacaaccagtccagtgaccttcacattctttggtgcagacgcgagtccgaactggaataacatgaaggatgctgtcggtcaagaaattactaaggcaacgggagttacaattgaagctgagtatgatgtgaataatggtggtgaccaaaagattcctttgatggctgccagtggtgattaccctgatattatctatcctaaaggcaatttgtctaagcttgtggatgcaggcgcgatgctggacctgaccgatctaattgaggagcatgctcccaacttgaaaaaaatctatggtgatcagatgaaccgtctgaaatacagtctggaagatcaagccatttacacgatcccgacgaatatgggtgtagataacgttgagtttgacgctaggggcggattcgaaattcaacaaagagtattgaaagagcttggctaccctgaagtaaaaacgcttgaggactacgagaacgtattgagaacgtattatgaaaaacatccaacgattgatggtcaaccgacgattccgttaacattgaatgcagatgactggaaaattatgattacggtaacgaaccctgcattccaagctacgggtggaccggatgacggtgagtattatatcaatcctgagacgtatgaagccgttctacactacaaacgtcctgaagaaaaagaatatttccgttggttgaacaaaatgtacaatgagggtctgcttgataaagatacatttgttcaaaaggatgaccaatacaaatccaaaattgccagtggccgtgtacttggtctaattgaccaagagtggaactatggtgaggcggagaatgctttgaaatcatctaacggtggagacaaaacatatgcccacttctccgtatccttgaacaaggatattgtggatcatacgttccaaccgacgggatttgacggttatggtatcggaatcacaacttcggccaaagatccggtacgtattatcaaattcatggattggcttgcttccgatgaaggtcaggtcctgagaaactggggcgttgaaggccaacattaccaagtcgagaatgggaaacgcatcattccggctgacgtacaagatcgcaaaaccaatgataactctgcttttaccaaagaatcaggcgtaggtatgtataacatatttagcgccagatatggtgatggtgtgaaagatgccacggataactactatacaacgaacttccctgaacagattcaagctggctacactgccgctgagaaggaaacgttgaaagcctatggtattacaacatggaaagatttctatccttccgacgatgatctgaagctgaaagattggggcgcagcatacaacatgcctgtaccatctgacacggattacaacgtaacgttccagaaaacacaggatatcgtacgtaaacgtattccagaggcgatccttgccaaacctgagaacttcgacagcgtatatgatagtcttctggctgaactcgataaagcgggtgcagtggagatggagaaacaatacacggtttggatcaaagaacgtgtagctctctggactggaaaagatgtgaaataagcttgaaaaccaagcattaaagttaaggattttcatagcaaaaaaagccctttctcaagggctttttttattgttgacgtgaggagatggatagcctataatctatcatgtaagcactttcagtaagcggtttatctcatttacgaaaacgttttacgtttgttagaagaagaatctttctttttgcagaatcgaaacgtaagcttcagtaaatacgtcggaatgaacgatgccgaaagcgcattcaaaaaaagtggtatcctcaggcataaagcctgttatacagataaaaccttcataaataatagggggaactagacaatgagaggcaaaatgaaaggcaatacacccaagacgtttgcaatgttgatgctcgcaagtgcaatgttggttacagctggttgcgggaattcgggaaccaaagagacttcggagtccagcggaaccgaaccgatcacagttacattcttcggggcggatgctagtccaacctggaataagatgcaagatgctgttggtaaaaagattacggagcaaactggcgttactcttgaagcagagtatgatgtaaacgatggtggtaaccagaagattgcactaatggctgccagtggtgactttcctgatatgatctaccctaaaggtaacttatctaagcttgtggatgcaggcgcgatgctggatctcacggatctgattgaggagcatgctcccaatctgaaaaaaatctatggggaacagatgaaccgtttgaaatacagtttggaagatcaagcgatctataccattccaaccaatatgggtgttgataatgttacgtttgacgctacaggtggatttgaaattcagcaaagagtattgaaagagcttggataccctgaagtgaagacacttgaggattacgagaatgtacttagagcctattatgaaaaacatccaaccattgatggtcaaccaaccattccattaacattgaatgcagatgattggaaaatcatgatcacggtaacgaacccggctttccaggcaacaggtgcaccggatgatggtgaatattacattgaccctgaaacgtatgaagcaaaattgcactacaaacgtccagaggaaagagaatatttccgctggttgaataaaatgtacaatgaaggcctactggacaaagatgcctttgttcaaaaggatgaccaatacaagtccaaaattgccagtggccgtgtcctcggtctgattgaccaagagtggaactatcaagaagcggagaacgcgcttaaatcatcaggtaaggatgatgccacatacgctcacttctctgtatcacttaacgatgagattgtggatcatacgttccaaccagccggatttgacggttatggcatcgggattacaacttcggccaaagatccagtgcgtatcatcaaattcatggattggcttgcttccgatgaaggacaagttctgagaaactggggtatcggaggtgaacattacaacgtagaagatggtaaacgcgtgattccagaagacgttcaggaccgcaaaacgaatgacaactccaatttcagcaaggaaacaggaattgggatgtataacatatttagcgcaagatacggtgatggtgtaaaagattctacggataactattacacaaccaacttccctgagcagattgtagctggttacacggctgcagagaaagaaacgctgaaagcttatggtatcacgacatggaaagagttctatccggctgaagaagatctgccagttaaggattggggcgcagcgtataacatgtccgtaccttccggtacagactatgaggtaacgttccagaaaacgcaggatatcatccgtaaacggattccggaagctgttctgactacaccagccaactttgatgcaacctatgatgctttactggctgatttggacaaagcgggtgcagttgaaatggagaaacaatttacggtttgggttaaggaacgtgtctctctgtggacaggaaaagacgtaaaataatatggattgtctgcgatccatggttacacaaggaaagggccctatatggggccttttttttgtggaatgatgtgatgatttgcattgacgcaaattttgaaatcacatataattttattattgtaagcacttaccgaaaacgttttatgacataagaaatatactgcttatttaggaacaggagctaaacatgtcccaacacaataacgaacctaaaatcaatcgtctatggtatcaacaaccggcaaaacgctgggaagaagcattgcccatcggaaacggccgtcttggaggcatggtgtacggaggcgcagcagatgaacgaattcagctcaatgaagatacattatggtcagggtttccacgggatacgattcaatacagcagtcagcggtatttgaaacagacgcgagagttgatcatgtctgggcagtatggtgaagctgaggatttgttgaaccgtgaaatgcttggtcgtgatgtggaggcttaccagccgatgggtcattttctattgcaccatgagggtctggatgatctttcatatgatgcatttgaacgggagcttgatctggaatcgggtattgcaaccacaacctactcattggaaggaactcaatacgtacgtgaagtgtattcaagtgcttcggatgatctgatggtctgcacattaactgctgatcagaagggcgctgtgagtgtaagtgttacgctagacagtccccatccctatcgcgttgagacttcgggagatgctctaaccatgttcagtcggtgcccaagtcatgtggagtccaattacttcagagatcacccggaatccgttctctatgaagaggatcggggaacggcttatgctgtccgtgtagcatttacggcatctggcgatcaggtgaaggtctccaatctggaaggcaagttacatattcagggtgctgatcaggttgtgttttatctggcagcggctacctcctttgagagttacgatgtgttacctgtgaaggatcatcttgtattggaagaggaatgtaaggagatgatctccaaagcgaccacacatggcgcggaagcgcttcgtgaccgacatattcaggatcacagcgcgttgtttaacagagtctctattgatttaggggtatcggctaacgccgaattacctacagatgagcggctgcaggcttatcaggcagggcaacaagaccttggactggaggcgctttattttcaatatggaagatatctgttaatggctagttcgcgtccgggcagccagcctgccaatctgcagggaatctggaatcatcaggtagagccgccatggcacagtgactacacgatcaacatcaacacggagatgaattactggccagcggaagtctgtaatctcagtgaatgccatgagccactgtttgatatgctgaccgatctcagtgatacaggacgaagaacggcgcggattctgtatggagcccgtggatggactgcccatcataacgtggatatctggagaacctctacaccgacaggtggagatgcaagctgggctttttggccgatgggtggcgtgtggctgacctcgcatctatgggagcattaccaatttaccggggatcagcgttttcttgaggaacgtgcgtatcccatcatgaaagaggcggcgctgttctgtctcgattggctggtggaagggcccgatggttatctggttacgattccatccacttcaccagagaataagtttctcacagatgctggggaggcacgcagtatatccatggcttcaacgatggatatgacgttaattcgtgaactgttcagccgctgtattgaggcctcgaagcaactaaatatagatgagtcgttggcaagcgagtggagcgaggctctggagaaactctatccattccgaattggaagcgaaggacaattgctggagtggtttaaggattttgccgaatccgagccagggcatcgtcacgtctcccatctgtatggactgtatccgggagagcagatcaatcgagtgcacacaccagaacttgtggaagctgcaagggtatcgcttgaacgtcgtatctcacaaggtggtgggcacacaggatggagctgtgcatggttgatcaatctgtatgcacgactgctggatggcagccaggcacatcagtttgtgcgcacgttgctggcccgatccacacatccgaatctgtttgatgaccatccgccgttccagatcgatggtaactttggaggcacggctggaatagccgagatgttgttgcagagtcacttgaacgagttacatttactgccggcactgcctgaactctggactcaaggtcgagttgaagggcttcgtgcaagaggtagttatacagtgggaataacatgggcggacaacaagcttgcgtcagcagtcatcaaagcagaacgaagtgacacgctgaccgttcgcagtgcttatccgctgcgtgtggaaggacatgaacaagccaaggcagagcttacgcctcagggcgattatgtaattattttaaccatgaccgcaggacagacgatccgcgtgtcatcatgagacggaggagccaaccatgacgatttttaaatttccgcaagattttcgctggggaacagcaacagcttcctatcaaatagaaggagctacacaggaaggtggacgcggggtatccatctgggatacgtttgcgcgcacacctggcaaggtatataacggagacaatggggatgtcgcatgtgacagttaccaccgttacgaggaagacatcgaactaatgaagaaactcgggattaatacgtaccggttctccattgcctggccgcgtattattcctgacggagatggtgagatcaatcgggaaggtctggacttctaccaccgcttcgtggatgcattaatcgcagctggaattgaaccgttcctcacactgtatcactgggatcttccgcaaacgctggaggatgacggaggctggggcaaccgcagaactgtggatgcttttgtgaaatatgccgaagtgatcttcaaagaattctcgggcaaaatcaacttctggctgacattcaacgaaccatggtgtatcgcgttcctgtcgaaccttctggggattcatgcgccaggaaacaaagacctgcaaacttctattaatgtggcacatggattactggttgctcatggtaaagccgttcaatccttccgtcgcttgggaacaaccggtcagattggtattgctccgaacgtgtgctgggctgagccgtacagtaaatctcctgaggaccaagctgcgtgtgaccgatcaattgcgcttaataccgattggttccttgatccaatctacaaaggttcatatccgcagtttatggtggattggttcgcagaagcgggggctaccgtaccaattcaggaaggtgatatggagatcatctcgcaaccgatcgatctgctcggcattaactattacacgatggggatcaatcgcttcaatccggaggcaggtgctctgcaatcggaagaagttgatatgggcctcaccaaaactgatattggctggcctgtggaatcacgtggtttgtatgaatttatgcattacttgcaaaagtacggcaatgtggatgtatatatcacagagaatggtgcctgcatcaatgatgatctggagaacggaaaaattaacgatgatcgccggatttcatattatgagcagcatttggctcaaattcaccgcatcattaatgacggcattaacctgaaagggtacatggcatggtcactgatggataatttcgagtgggcagaaggctaccggatgcgttttggtcttgttcatatggactatcgttcactcgtgagaacaccgaaggagagttattactggtatcagagcgtcatcaagaataattggttggagacacggaacgaacataatccccaatagcttgggtggcaggttttaagggtaaagcaggtccgcattatatatggttcccttattaaagctgagaacgacggtaacattggagtattccaatgtgccgtctttttttgtgtttttaccgttggaaatgagtagttcataaaggtttcataaggtcaagtgcagttcctgttatgaagagacgttttttgggttataagaagtatgaatgaatttaataatgttttgtcaatggtcgaaatgaaaataaagtgtccaaattgcgaataaaatttgaacatttgttgactaaaaatcatactgatgtggtatattggtataaggaaagcacttacaaaaagggaaaaggaagtgtttactatggcatcgaagacagcaatggtcagccaattggagcgcaaagacaaaaatatgcggcgcgccgtcttgacgatgacagttctggcatgggtcgcactcattacgggagtgatcatgtgtctgatcaatctgaacgaatttaatgatcgtaatcttggcttgatggttggtattggattccttgtaggtagtgtgtttatttacgttattgccaaagcgattggccttgttcatacacgccgggaagacgaaggcgccgattgattataatcctgcgttaattcgttcataataagactggatgagttcccggaatccagtcaataaagccctttgcggattcgttgacactgttcaacgggactgcaaagggttttattttgtgacttgatgtgtaaagattacgaagtacaaatatcaagcatgcaagcgatttgtgagaaaaaattcacacatttaaggtgtaaaatcgacaaatttgttaacaagaacaaaaaagttgttcatttctgatatctttagtaggaagagagtagtatactgatttttcagtatgagcgaatttaaggagaggggatcaaaatgaacaagaaacctaggtcgctaatccggattatcattccggttgtcctgacgttggttacaattgcattgattgtctggccaatgctggcaggcggacagtacgttgttctggatccgaaggggccaattggcgcttcgcagagagatttgattgtcatctcgacaattttgtgtgctgtcatcattgtgccagtactcattttggctgccgtaatcgtatggcgttaccgtgagaaaccggacaacaaagcagcatatgaacctaactgggctcatagcaccaaagcagaggttgtatggtggaccattccaatcattattattgggatacttgcaattgtaacgattcgttacacttatgttctggaaccttcgaagccgttggctcacgagaaagcaccaattaccatccaagtgtcttcactggactggaaatggctgtttatgtatccagaacaaggaattgcaacggttaatacgttgaatattccggcagaccggcctgtgaaatttgaactcactgcggattcaccgatgaactcattctggattccgcaacttggaggacagatttatacgatgtcgggtatggcgatgaccttgtatctgcaggcagatcatgaaggcaagtactggggttcaggcgctaacttcacaggtgagcattttggagaaatgcgttttgatgtgaatgctacatcggacgaagattttgacaattgggtagctgaagtgaaacagagttctcaggcgttgactacagaaggttacaaagcactggctgagccaggcacaagcaacgttgcttattattctgccttcccagaaggattgttccaaaatattgtgaccaagtatgtagtagatggtcaaagtgctcacagtaagcatggaacttcaaaagaagcttctggagccattcaaaatgcaactgatacgtccaatcaagacgaggacaagagtgctaactaaagattcgaaaggaggcccccaatgttagagggacttaaagagtttgcatcggagtttttcgtaaccggtgatccgctcatttatggtgcgatggtagctatcggaattaccatgattactattgtagcggtactaacttatttcaaaaaatggggctggctctggcgtaactggttaactaccgtcgatcacaaaaagatcggtattatgtatatcattgcttccattatcatgttattccgtggtggtgtggatgcgctaatgatgcgccttcagctagctatgcctaacaatgaatttctaaatcctgaacactataatcaggtcttcacaactcacggtacgatcatgatcttgttcatggcgatgccatttatgtttggtctatttaacgttatcgtgccattacagatcggagcaagggacgttgcgttcccgttcctgaatgcactgagcttctggttattcttcctgggagcaatgctgtttaacctgtcatttgttatcggtggttcaccggatgcaggatggctgagttatccacctctatcggagctgtcgcacagccctggagtaggacagaacttctatatatggggtattcagatatcgggtatcggttccctggctaccggtatcaacttcctggttaccatcattaaaatgcgtgcgccaggcatgagatggatgaaaatgccgatgttcacatggtcggtattctccacttgtatcattatcttgtttgctttcccgatcttgaccgtgacacttgcattgttattcctcgacaggtttgccggggcgcatttcttcacacttgatctgggcggtaacccaatgatgtatatcaacttgatctggatgtggggtcaccctgaggtatacattgtcgtcttgccggcattcggtgttttctccgagattgtgagtaccttctctcggaaaaaactgtttggctacaagtcgatggtattcgcgatgttgatcatcagcttcctgtccttcttcacatgggcgcatcacttcttcacgatgggttccggagcagacgtgaatgcattcttcgccgtaactacgatgttgattgctattccaacaggggttaagatattcaactggctgtttaccatgtatcgaggaaggattcgcatggcgactccgatgatgtggacacttgcctttatcccgtgctttattgtcgggggtatgacaggcgttctgttatccgttgctcctgctgacttccagttccacaacagttacttcctgattgcccacttccaccaagtattgatcggtggagttgtcttcggatacttcgcaggtctgtactactggtggcctaaaatgttcggtttccaactcgaagagaaactgggcaaatgggcattctggacttggaatattggtttctatgtctgcttcatgccgcagtacgctgtcggtctaatgggtatgacacgtcgtctgagcacatacggctgggatactggctggtgggaactgaacttcgtatccacaatcggggcattcctgatgggtgtcggattcctgttccaagttgcacaaatcgcagacggtattcgcaaatacaaatcacttaaagcttccgccgatccatgggatggccgtacgctggagtggtcaattccttcaccagctcctgaatacaacttcgccattacaccgcgcggagatgatattgatgagtggtgggaagagaaagaacgtcgtgccaaaggcatctatccgccagagcaaccgcttgagccgattcatatgccgaagaactctggaattccgttcatcatgtctgtcttctggttcatcgccggtttcggctttgtcttcggatggttgtggatggcaattctcggactcgctggcgtagggatctgtatgatcgcccgttcattctcatatgatacggattattacattccggttgacgaaattaaacgtaccgaagcgtcgttaagggggtcggtatagatggctcaagcagccgctaagcacggtgagaatcatgcacatggtcacgaccatggacatcatgatccacaggaaatgaaaattctcggtttctggttcttcctgatttccgacgttatcctgttctccgtattgttcgcaaccttcattgtgttgcgtgacaatacggcgggcggaccgattttgtctgaattgatcaaaatgcctggtgttattgccgaaacgtttatcttgctcacaagttcatttacgagcggactagccgtactggcgatgaatcaaggcaaagtaaaacaattaatcagttggctggcagttacagccgttctgggtgcaagctttatcgcactggaagtatatgagtttattgagttgattcacgaagggttcagctttacaacgagtgctgcttctggcgcattcttcacccttgtgggaactcacggacttcacgtatcgctcggtctgatctggatgattggacttatgttacaactgaaaaaacgtggtattaccgatgttactcgcggtaaaattaacgtcatcagcttgtactggcacttcttggacgtcgtatggattttcctcctgtcgatcgtctatctcatgggggtgatgtagatgtcagagcacaactcacatgattcccacggtcatgagcaacatggttcactgaagtcttatgtcatcggcttcattctgtccgtcgttctgacaatcattccacttgtggtggttctcaatgatatgatggaaagaacaggaacactcattgttgttcttggcacggcagcacttcagtttgtggttcaactcttcttcttcatgcatatccgtgaaacagagaaaccacgctggaatgtgatggctcttatcttcggtttgctgattatgatgaccatcgtaattggttcgatctggattatgcttaacaatgctgttgcacattaattgatatgatgaaagagcttcacgaccttggaattcaaggttgtggggctcttttttttctaagcagaagttatcgcatattttaatgaaaaaaaagttggattatatcataataagtcgttgatgaaataatttaccagtgatactattgttatacactctggaaatatattcaatattttagttagagcaattttagcaaaattattttaggagatgtactaatgaaagcaagggtaatccgttattatcgttttggcgaaccaagtgaagtgttatgtatggaagaaaaagatgtgataccccctggccccggtgaattagcagtgaggatgtatgctcggcctattaatccctccgatattattcctgttcgaggagcttacccgcatcgtacccgattaccagctgttcccgggtttgagggtgtgggggtggtagaagcagtagggccgggagtttccaatcaaatgttgggtcgccgtgtcttgccactaaaaggtgagaatacttggcaggacgtcgtgaagactttggagcgacatacaatcattgtgccgaatgatatcgatgatcactcagcaagtcagctctatattaatccggttacggcttggttgatctgtacagaggtgcttaagcttacgtatggtgataccctgattgtgaatgcagggggatctgcaatcgggcgaatctttgcacagatctcaaaaatctatggatttaaattgattgcgcttacgagagatgatcgtcatactgctgaactgtatcgtcttggagcagcttctgttatcaatacaacgaaagagttgctacaggctagaatcacggaattaacagaggggtgcggtgctgatgcagccgtggattgtattggagggacagatggggaacagttggtgagttgccttaagccaaatgggacggtcatcagtgtaggactgctttcggggatcacaccgttatggcatgaagtaacccggagaacacaagttcatgtgaaacttttctggttaaaacattgggtggaatgctgttcgcaagaacgatgggaacaggtatttcatgaggtgatggagctggtcagagcagggaggcttgtcatgacaaacattggggcgacgtatgaactaacgaatgtacaacaggctattgcagcggctgaatcgggtatcgaggggaagattctcttaatacagtagtacataagacttggaaaaaactcaacataaagtaatgcgtaattaacaactaaatcatattgggggccttgttgtgaagattaaagatatgatgtttactgcgattatggcagccgttattgcagtacttggactgttacctccgattccactaccatttatacctgtgccaattacagtccaaacgctgggcgtgatgctggcaggcagtatccttggtgctcgattgggagggataagtctcttgctctttgttgttctgatcggtttaggagctccattgttgtccggaggcagagggggcttgggtgttctggttggacctacaggcgggtatgttcttagttatccgattgctgcttttgtgattgggttgttagttcaacgtacgtccgttgcaggcattaaattttggaactttctactgagcaacattgtgggtggaatccttgttgtgtatgcagtgggtattccattcctgtcctttataacggatgtaccaattacacaggctatcataggcaaccttgttttcattccaggtgacctgctcaaagcagtgcttgcttcacttattgctgttagaatcctcaaggtaagtcctacaatgatccaggatacgaaaaggcagactccgggggtctaacattatgatattcagagactgcacattcctaagcacttctatacaagtaaatcgcgccaagtgatggaggtactacagtgattcatttttccaatgtaacgtttggttatgcaaaccgagcaacaatgttaaacgatattaaccttcatattcgttctggtgaatacgtggcgtttgctggaaggaatggagcagggaaatccaccatagctaggttaatgaacgggttactccttccaaccacaggccaagtaacttttaatgattatgtgacatccaatgaaaatgatttaagtatcattcgtcagagaattggaatgatctttcaaaatccagagaatcaaattgtagcatctacagtgtttgaagatatcgccttcggcctgcaaaacgtctgtgtccctactgaagatatcgagcgtcatgtaacagaggcattgaggcaagtggggatgctggattattataattctgatgtatattcgttatcaggagggcaaaaacagcgtatcgctattgcgggagttctcgctatgggaccagaagttattgtttttgatgaatctacctcaatgctcgacccggaaggcaaagatcagattgcattgctgatgggagagttgcataaacaaggaattacgattgtaacaattacgcatgacttagaggagattgcagcatcttcgagggttattgtacttgatcagggtgacatttgttatgatggatcgcccgaggccttgtttcagggcgaatactggcgttttcccgggataacggctccttttattgtcgaggcaagagaggcactgaaccggaaggggctacactcttcttcggcactcactctggaagatttggtggatgatttatgcaaattacactaaaagaagtggacttctcgtatcatgttggaacaccactggagaacaacgtattgagcaacattacactcaccatgggcgataatcgcatttttgctgttgtgggaaaaacgggatctggcaagtcaacttttgtacagctgctcaatgggcttctgcaacctacaaatggaacagttgatataggggattttcgaatgacaaccgatcgaaagaaaacgcacgttctctacgataaagtgggtattgtattccaatttccggagcatcaattattcgaggatacggtaataaaagacatttcctttggtcccaagaacttgggctggtcagctgaaaaagttcgtagtacatgcttggatgcattacacatggtaggtctggacgaatctttctgcaatagatcaccgtttgaattaagtggcggagagaagcggagagtggcaattgcaagtgtgttagcgatgaacccggaggtacttattctcgacgagccaaccgtagggttggattcggaagggaaagagcagctgatggaactcttttgttcctggcagcaggaacaggggagtacgatcattatggtgacgcacgatatggagactgttgccgagtacgccgaagaagtgattatatttgaacgtggtcaagtgcaaagacatacgactccgctccaattgttcactgaatatcaagttgagttgaaagatatgggattaaagctgcctaaagcgctccagctcgtggaagccataaatgtaaaattgaatgttgaattgcagctggattcggtaaagaaagaatggattttgtcatatattgctgatttttttcagaggaaggaattgtagttatgtccttatctcaatcctttatcattggtcagtatgtccacagaaactccatcattcaccggcttgatccaagagctaaactcgtcatcgcgttcctgttcatgttgtctgtcatgctgttgaactcatggctttcatacgtattgtctgcggtgtttgtggtgtgtgtagtcactatatcgcaaataccaccctcctatattgttagaggattgaaacctgtttggctaatagtcattgtcacatctgtgtttcacatttttctgacacaaggggggcagttatggcttgaagcgggagtgttttcgatctacgaggagggtgtcattaaagcagctaatatagccattcgcatcattcttcttctcgtcatcgcttcattgttgacacttacgacaaagctgggtgatctcgcacaggctattgaagatctgttgaagcctgccaagcggttgggtgttcctacacaggaatttgcgttgatgatctcgtggacgatccgctttattccaatcctgttgaatgaaaccgacaacgtgatgaaggcacagcgggcaagaggtgttcgttttaattccggtaatatcgttcgtcgtctgcaaagttttatcccaattgtagtccctatccttctattagctttccagaaagccgaaagcgcttcactggccgttgaggcacgcggatatagcccaggcatgaatcgaacgcaactgagaacgttagctttcaaaaagctcgactatcaagtgctgatcatatccattttttgtttcgcacttttgttggcattacgaaagtgaggtaagctatgaggatttacccgacaaatctacatgaatatcacaaactcatatcagtatctaaaggtgatcagcctgcgacaatgtggtttagacaggcatcttacttgaacgtatacacaggggaagttgaacaagcgaatatctatctgtccggaagtcgtattgcctacgttggagccaaggaactacccacttcagaccagacccaggtcattgaattggagaaagatcatgttgttgttccaggatatattgaacctcatgcacacccatgccaaatgtacaatccttatacatggggagaagctctgttacagaagggtacggtcttgtccattaatgataatctgtctttgttaacgtttctaggaactgaagctttgtcattcattgagaagctggaggagacaagtcaccatatgttcctatggtggtgtaacattgaccgtcctgatcgagctgatccaatgactatggacaagtggctacaacataaccttgtgatacagagcggggaactgaccgagtggcccaaactgctggcgaacgacgaagtattggtagagcaactttatctaacgaaggctcatcatgggatgagggcggaaggacatttgccgggcgtatcttatgaaaaaataattactatggctgcagcgggcatcacagctgaccacgaagctctccatgccgaagatgtacttagacgattaaaagcggggctatacgcctctcttcgatactcatctattcgtcctgatttgccacacctccttaaagggatgaaaggtgattcccggttcaatatgaaccgaatgatgcttaccagcgatggcccgtcaccaaattatgtggagaggacgagctgtgccagcatgatcaagatctgtatggagacgggaatatctgtagcggatgcctatcgtcttgctaccttaaatccggcagtatattacggtctggatgaagacttaggcgggattgcaccaggcagactggcttgtttgaacgtcttaacctccataaatgaacctgatccactgcatgtcctgcaacgaggtgattgggtggtccaaaatcaaaggcgaatagtagagccagatgaagcagagatacacacttggttgcgctccacttttcggtctcgtcgaacgatcggtaacctgaggctggaccagatggaaactcgaaccgacatcggtattgaattggtgaacgatgtcatcacccaatcgtaccattttgatccccgagcggaattggaaacggatgagaactggatgacattactggatgttaacggaagttgggtgattaacacccgaatcaaaggtttagcgtgtgggatcaaggcattagcaagtacttacaacgcttcgaacgatacacttttacttgggcgatctctgtctgtcatgcgcgaagcatctcaggagttggaagttcgcggggaaggaatattagtatatttcgtggatggggagcaactgtacattcctcttcctctcagtggagctatgagcttggagagcgtggcatcaatcggcgctaatgtggatcatttcaatgagaaaatgcgtgtccacggttaccgatttggtgatcctctgtattctcttttatttctgacagcttcacatttgccgcatattcgtgtatcggacaaagggttgtatctggttaaaacaggtgagatagtgctcccggctacccccttagttaatacagtaaggaaggtgaaatgatgttactggctgatgcgatacgcatgcatgcttcccagaatcctgagaaaactgccatctttgatgatgcccggcagatttcgtacgccgagctataccatggaataaagctggcagcaaatacaattctggctactgaggaagatttcgaagccgatgaacttcctcttgtcggcctgctgatgaacaatagtgccgtgatgatcgaatactttcttgcagccaccaaaattggaatgtgtgctgctgtatttgatcccaagtggagcgatgcaaatctgacggaggttattaatgaatgtgaacctcgtgtgcttgtcatagatgtggagttcaaagccagaatacctcatattccatcgtcaacaagggtgattactgtggatacaggtgaacctcgttctctcagaagggaagaagccgaaccacagcgatcctcaaccgaagatagcctgttctacatgggatatacctccgggacgaccggacgaccgaaaggctatctccgttctcagcgttcatggatcgagagctttgcatatgcgcgtgaaacattcgtgcatgatgcaggagaccatgtattggcgccgggttctttggtctattcacttacgttatatgcgtgcattcaaacgttgtatattggcgggacattccatctaacaagcaaattccgagcggaatacgtattggagacgttagcaacacatgcggttacacatctttatcttgtacctacgatgtttgaagcactctacaaagcgttcatggcttctgattcagttactgcgctgtcatccgtcagatctctcattacgtcaggtgataaatggtcaccagaatccaaacggaaggtgaaagaggtatttgagaatgcaggcttgtatgaattttatggtgcctccgagctaagctttgtcacagtacttgatccggaaggaaatcggtataaacctgattcaatcggtaaaccgtttgccggtgtgcaggtatccattcgtgaagtggatagtacggaggtaaccgaaggcgcagtaggacaattgtttgtgaagagcccgatgatctttgccggatattatggttccgaggaagaaaccagccaagttgtacatggtgaatgggcaactgtgggagaccttgcaacacgagattccgaaggttatttatatctggttggtcgaaagaaaaacatgattattagcggagggcttaatatatatccggaggaaatcgagaagctgttgttaacattggaaggtattgaggaggtcatcgttgtaggtgtacccgatgtatactggggccaaaaggtgagcgcacttatcaagctcagaatgggtagcgaggttagtgatgatgagattgtatcattgtgccgtcgtgagcttgctacctacaagtgtccaaaggaaattatacgggtggatgccttcccctatacaacgagtggaaagatttcgcgaacaaaactgaacgagttactgaaaataaagatatgaacaatatgttgattcctgttattctttccgcgaagcgaactgcaatcggcaaatacggggggatgtttaaggagacaccgccggagatactggctgcagaagtcattcaggccattttaagcgaaattcccatccctcccggtgacattgatgatgttctattggggaatgcagtaggcgggggaggtaacatcgccaggttatccgcgttacaagccaaactcccagtagaggtccctggcgtgacgattgatcgtcaatgcggatctggtcttgaagccattcatttagcagcgaggctgattcaatcaggtgccggggaagtgtatctggctggtggtgtcgaaagcacaagtcgtgcaccctggagattggagaaacccttgtctctgtacgggagtgtagtacctcaagtaatcactcgcacacgattctctccggaatggatcggagatccggatatggggaaggcggctaacaacgttgctaagaagtacggtgtgactcgaatggaccaggacgaatatgcgctttccagtcataggaaagcgattgcttcaatacaaagcgggcgtttcgacaacgaaatcgttccattgtctatcccggagggtaagcaacttagaatcattcatacagacgaatgtcctcgggcgaatacaacacttacgaagcttgcagcattgccatctgttttcgaacaggatggtacagtgacggctggtaatgcatgtccattgaatgatggagccgctatcgttttaatcatgtcaatgggaaaagcattatcgttaggacttacaccactaatgaaatttatcgacagtgtggcagtgggcgttgacccgaactacttgggtatcggtccggttcctgccgttaccaagttgctcagccgaaatcgcttggcaatggaagacattgatcttgtggaattcaatgaagcgttcgcttcacaagttctggcctctttaagagaactgcatattccaactcacattgttaatgtggggggcggggcactggcgcttggacacccgttcggtgcatcgggagccatcctggttacacgcctattcaacgagatgaggcatataaagggggctcggggaatcacaacactgggtattggtggcgggatcgggcttgcatcattgtgggagaagtgcgaataggaggaaacagcctttgttgttagagggacaggtagcagtcattacgggttccagccgcggaattgggcgtgcaaccgcaatacgtatggcacaagaaggagccaagatagttgtcaacggtgtacaagaaggtggggtatgggacgttgtccagttgattcgggatcagggtgggaccgctattggggtcgttgaatccgttgcaagcatggccggtggtgaacgcatcatatcggagggtcttcgcgaattcggcaagattgatatcctggtgaacaacgccggagttgttcacgataagatggcccataaaatgagtgaaaccgagtgggatcttgtattgaattcgcatcttaagggagcctttgcttgtatccggtccgctctgccgagcatgagggaacgaagggaaggcagcattattaatatgatctccgtggcgggcttgaccggaatgatcggacaattaaattacagtgctgccaaagccggattgataggcatgacgtggacactttcgctggaacttgaatcttatggcattaatgtgaatgcagtttctcccgcagcgcgtactgacatgacaatgccctatatcgaacgggcgaagcagaccgctgaaatgaaaggcgagtcgtttcccgagtactggaaagtaggttcaacggaagatgtggccgaattgatgctttccttatgtctgccgcgttgccgtagggttaccggtcagatcttctctgttaatggtggaaagatcggtgtgtggtcccctccagagcaccgtatagttgccacccaatccagtagggagaacggttgggaagcaagcgaactctttgagcaagtgttgtcagcctacgtgaaagtgtagaactatttccgaaatatacgaattgatggaggaaattttgttgaagaaaaaacgcatttttattgggatgatggccgggatggggagagtgaatcgttgtcttcccatagcactaaagttacgagagatgggacatgaggtggcgttcacaatctggggaaatgccggggtggcgatggaacagatgggttttacctatattccgattccagttattcctgctcccaagggacaggttttccacccaaacttcaaggatatgaatcactttttgtccatgatggggtactcggaccctgtttacatgcgaaatgagcttgaagctcgtctgcgggtaaccatcggttttaaaccggaccttgttatttccgattcgagtgtccccgcagcgttcattgcctgtaagctggacattcctctcgtttctatgaatcagtccagcacacttccaggtggtcttccttttacaacgaattatggattatatggagacataccagatgtcacgaatgtattgaacggagcgttggttgagtatggtctgcctgaaacggacaaccttctcacatttctggcgggtaatcttgcccttcttccgagcataccggattttgatccggtacagatcgggaagctgcccgttccaattgaatatatcggtcccgtggtatggagagatacaaatgagacaggaatgcctgcgaactggttgaagaaatcagacaacgacaggaggccacgtgtatttgtatacacaagtcgtctcgtggaatggggtgtggagagtggtggtcatattttcagggaagccgttagagcactcggtaacacttcgacggagcttttgattgctactggttttaatccattggaaggggacagcgtggaagttccccctaatgtacacttcacctcatatgtatcgggagttatggcagccgagcatagcgatgtgatgattcaccatggcggacatggaagttgcatgacgacgatcttaacaggcacgccgtcgttggtcattccgacctgggcagaacgtgagtttaacgccaagcagttacaggacgttggcggtggcagagtaatgtccccagatgaggttacgggatccgctctagctgagaccgttaacgcgatgatgactaatggagacatggataaggctgtggcgctgaaggaaaacgtctgtacttcgcagtacggaggagccgggcgtgcagctgaactcattcgtcgtttgttgtaaagagggggcaaggttctattgaaaagtcttttggttgtcctgagaagtccggccttacttttattatccgtatgtattttttttattggtttgggatacggattaacgctaccattcatgccattattcggagtagaacgggctggaatgagccccttatcattagggatctttatggcgtgtggatcgttaagcggcattatcattagtacgctgtttagtcgattgtccgataaaaagcctgtgcgcaagtggatcattgttggatcatgtgtatctgcttctgtaggctatgtattctatgcaaatacggacagttacattgtgttaatgctggtttcctgtactttcatggccttgtctttctcggcctttccgcaattatttgctcttgcgagagaagtagtcgagagggaggcgagtgaagatgtcaccgttgttatggctgtattgcgagctctggtgtctctggcctggattcttggtcctgtaatggcgtcttttataatctaccagttctcgtacacaggcctgtttctggttgtttcgttgatgtacatgctcgttgccgtatttgtactgatgattcgagcagacgagattcgggaaccggggggcggaacggaattatcatctgactcagtacgtagcttcaagcgcctgctgatggcaccgcagattgtattttcattacttgctttcatggcatttgagttggctaatacgatggggggcattgtaactcccttatatgttacgcaagagttgcaaggcgggaagttggacgttggcatgatctcgggagttaacgcagccttgcaggttcccaccatgatcattttgggaatactggccaaaaggtttggtagtatcacagttatgaaatgcgcgggattgtttggagtcgcctatttttcactattttggtttacccaatcgggatggcagatcattgctatccagatattcagtgccatttttatcgcgattgtacttggagttggaatgactttttttcaggatttggttcctaaaatgacaggtacggccacaacgttgtacaacaatgcaaacatcattggttccatgggtggtggattactagccggagcagtcggaaattattttggttttaaaatagtgattgcctgttcggcagcacttgccttcctgggatttgtactattattggtgccaaacgcaaataaaaaggtagtccggcatgtgggaggagatacgtatgaaagctagtgtaattattctatcgcataatcagaaagaagtgattcaggcctgtttgtcttccttatcgagacagcgtttgtgtgaaggcgatcaatacgaagttgtagttatcgataacgggtctatagacggcacgggcgagatgatcggcaggcttacgtatgattttcctatacgatataatgacattccttctacggagcaatcaagtcgggcagcggcacgaaacaaggggattactatctcgaatggagatgtgatcgtgttccttgatggagatcaactcgccggaccggactttatctatgaacatttgagagtgcacaagctagccgaggggaaacttgtcatagggtttcgaagatatttgggtgaagagagcatcgatataacgtcgttaaattcgggatgggtgcatactgctattacatcatcagaagcagatgaacgatttcagctcatggaacgtttttcggaaaatggaagcgcattccgcacagcgtggcatctgtctttcagctgcaatttctcggtaacaagagaagtactgatccgatcgggtatgtttgacgaagggttcaagggatgggggttggaagacagtgagcttggctatcgtctgcaacaggctggaggaacgttcgtattgaacaaaaaagcgttaaccttccatatctttcacccttccgagtttgatgagaatcgttatgatggttggaaaacgaatctagattatttcctcgaatgtcatccgatgtttgaagtacaggcgcaaaacatcttaaaggaattttttgacccagagattagaaaatcatggtgggattgttatattcgctttgagaaggttgtaagagcacatcagggttacgagggggatcgattacctgtcagcatcattgttgtctatgccgagggcccagaactgatccagaccatttcggcagaagctgcccatagagaagtgttggttatagataagacaccatcatcggacctggatatcttgtgccaatgtattaacgagaaatttgatgttttgtattacaagcatccttcggaagatcagttaatcgacttgtaccatcagtatgcagtcaggggaattgtgaaacatgaaattttcaagtgatcatggatcagctgttctggccccaaatgatgacattttatacgggaggttgacatgaattttgaattgacagagcaacagaagcagattcaatccgccgcacgccattttgtggacgagctactgattccgttggaacctgaattattgcgtaacgagcgtgagggaagacccggaatcgaacttagacagattagagagcttcaacaaaaggcgaaaacacagggcctatggggtattgagacaccagaagagtatgggggagcaaatcttgggacggtcattagtgcactcctgaaaatggagctaggacgcacgtgtattccgtttgtcttcgggggggaagcggacaatattctgtacctttgcaacaaggcacaacagaacaagtatttgcttcccgttattgcgggcgagagacagtcctgttttgcaataacggagcgttcggcaggttccgatgcaagtcgaattcagatgagtgctgagcgtgtagcggatggttgggtactcaatggagagaaagtatttatcacaaacggaaacgaggcggattttgcaattgtttttgcagtgactgatgtccaggcagagccgggcaaagggatcacttgctttctggtggaccgggacatggggtggacgtcagagccgattcctacgatgggtggggataaaagcccttctgtacttacgtttaaccaagtgttcgtgccaaacggaaatgtgctcggtgaagaggggcaggggttaacaacagcgatgcagtggatcagtcgagggcgttgggtgattccggctattgctgtgggtgcatctggcaggctgatccatatggccattgattacgttaaagaaaggtcgacatttggagagcagttggcaagtcggcagagcatccaatggatgattgccgactctgctgttgagctggaggctctgaaatggctggtattatatactgcttggagggtggatcaggggctggatgcaagacatcatgcaacgatgtccaagttgtacggtgcaggtagagcaaacgatattgtggatcgggtccttcagatttttggtggaatcggatattcgaaggacttgccgatcgagcgttggtatcgggaaatgcgagtatggagaatcttcgagggcacagacgagattcaacgcatgattatttcccgcaatctgcttaagggtcatgtccgaattggagagtgggattaacgggccgtgtaacgaacggatccttcataggctagcaagttagaaggaacacccgctcgatgttcaatatagactgtgatactgcatgccagatgggagaggttatccgtgttgatgacactcacgaggacacggacgacgtccccttccatcacgggtgagcgaaatcggtattttatatcgcatagaatccagttatccaaccccagcatttgcagtcggtttccaatcatgccaccgataagcataccttgtgcaattcggcgaggtgcacctgcttcatgtgctttgagaacatccagatgaattgggttgttatcgttcgatgcagctgcataggcgatgagcatagcactggttatggttccaagacaagcgtcgaacaggagttcaccagatgagagacggtgtttcccatcccattgataataaatctccgagggatattgcggatacacaggctcgagttcggagtacgaaggctgcaacgctggagagtctagaagtattaatgtggtgttagcaacgagtacgggttgtttcatgacgttcgtaaccttcattgtacaatcaaggagctggatcttccccaaagatccagttgtttcgcgtacgtttgcaagttcaatcctgtaaaataaagctgcatcatacttcaatttacgttcgtatgtaaacgattgttggccatggatcataattttcccaggaagctccatccagggtaagtgtgtctgttgccaccatatcatcggaaaggtgagaggaatggatcttgcgtcgggacgaaattcttctggaaagccttgtgtgaactggacaatctgatctgtggtaataaccattttcttgggaggagtaggtactccgatccacgattggtaatccataacttgcatctctcctttgactgaccatgtcttgtattatatcgaaggcagttagaatcataaatgttttatcacataaattactttttcgaaaataaaggtacacaaaagatacataatgaactaaaatgaacttatatgaacattatcaaactcaatctcaactaatttaaatgacgaaaggaatggattaataatggaaaatcgttatgctgcacatcccaatgaagtgaaaacgtatgatacatctcgcctgcgtgaggaatttttgatggagcaactgtttgcaactgatgaattggtaacggtgtattctcatgtggatcgttatattgtgggaacggctgtacctgagagcaaggacattacccttgaagtgaacctgaaagatatcggaacgaactttttcctggagcgtcgtgaaatcggtatcattaatgtcggtggtcacggaacagtgacagcggacggacaaggttatgagattggagcgaaggaatgtctctacatcggtagaggtgttaaggaagttgtgttcacaagcagtgacaaggctcaacctgcccaattctattttgtatccacaccagctcatcacacctatccaacagttaaagcaacgcaagaacaagctcagccaaatcatctgggcagcatcgaaacatccaatgagcgtacgatctatcgttacattcaccaaggagaaggtggaattcagagttgtcagttggtgatgggcattaccgaactcgacaagggtaacatgtggaacaccatgcctgcacatacccataaccgccgttccgaagtatacttgtactggaacttgcctgaagacggtgttgtattccatatgatgggtgagccaaacgaaacacgtcatctggttgtacgcgaccgtcaggcgatcatttccccaagctggtccattcacagtggtgtgggtacaagcaattacaccttctgttgggcgatggctggtgagaaccagacgttcgaagatatggacggcgtagcgatgaaagacctgaaataataaattacagatgcctgagttaaattgacagggtagacgctaaaaactcattcatttgactcaggtagtataggaagttgattatgatgaatccattgaaaagacatgaaaaaattatggaggctctgctggaacgccaggaagtaaccgtcagtgatctgagtgagttgttgcaggtgactgggaagactgtgcgagaggatctcgacaagttggagagtatgggactgctcgtacgtgtccatggtggtgctatgctggctcagaatgaccagtatggcatcttgaatagccgcggagttaccgagaagcatcattcggagaagacggagattgctgaacgtgcccttgcttacattcgacctggagatatcgttgctctcgatggtggcagcaccacgctggagatggccaaacgtctcgacaatcagtctattacggtagtgactaatgatctattcatcattgcggagttgaccaaaaaggagcaagtgcgactggttgtgcctggcggggcgcgtgtacggaatatgttggttggggatgatacggctgcgtttatatccagtcttaacattcataaagcctttatatccacgacagcccttcatccggaatttggattatccatatacacgggagatctggttcctttgaaaaaagcaatgatatctgcctcgcagcaagtatacggcgttgtggatcattataaattcggacaatttgcactgcgaactttcgcccagtgttcgcaactggactatattatcagcgatagtcgtttggatgaagagacggctgccttatacgagcagagcggtgtcacagtggattatcaaagttaacctcattcattattcatgggattaaagaacggacggatctaaggattgcatatcaaaaccatgcggaggaatcattcatgaacccatttgatttaagcggacaagttgcactggtgacaggtacctcgggaggacttggacaagggatggccattggtttggcagaagcaggtgctgatgtggtgctggtctcttattccaagcctgcggcaacggcaagtgccattgaagcactcggacgcaaagcttatgtgattgaagcggatttaagtcgtgaagatgagttgtcggctgtgttcgaacaggcgcttgcgttccagggcagaattgacattctcgtcaacaatgccggaatcattcgtcgcacacctgcggctgatcatgcagttcaggactggcatgatgtaattggtctgaacctgaacactgtatttttcctaagccaattggcaggcagacatatgattgaacgcggaagtggcaaaatcattaatattgcatccatgttgtcctatcaaggtgggatcaacgtgccagggtatacagccagtaaacatggcgttgccggtttaaccaaagcactcgccaatgaatgggcagggaagggaatccagattaacggtatcgcacctggttatatggaaaccgataatactacccagatccgtgcggacgagaatcgttaccgggatattacagcccgtattcctgctgggcgttggggaacacctgaagatctgaaaggcccggttgtctttctggcatctgccgcttcggattatctgaatggtcatgtgctgaatgtcgatggcggctggatggcacgttaatcacttgataatcggattagcataaggaggcagtgagatgaaacttggtattctggcacatacatttggcaaacagcctacagcacagcttgcgcagacgattgcggataacggatttaattccgtacagctggcgctggccaaagcattatcagatgtggactcatcgaatggcaagctgagcccagggctagcgaatgagatcggagatcaatttgcacagcgcggggtgaaaattgcggtactgggctgttatattaatccgattgaccctgatccggtaagacgacgtgcggacattgatcgattcaaggagcatctgcgttatgcccgggattttggttgcagcatggtagcaacggagaccggcggcttggacacctatcaggatacacatccggatggatatgaagagaaggcgtggagtgtgctgaaagaaacggttgaggagttggctgaggaagcggagaaatggggcgtgcatgcggcgattgagcctgtgtcgacacatactcttcatacccatgaacatatgacacgtttgtttgaagagattccttcatcaaatctggggatgctgttcgatccgtgtaatctgatcaaacaaccacatgcagcagatcaaggggctttcttgcgcgaggtgatggaatcgctgtatcagcgcataattgtgatccatgccaaagatgtagcctttgatgcacagggagagaagtacaatccggtacctggggcagggatactggattacccgttattttttgaattgctaaaaacgtataagccacatatcgatatttcacttgaaggcgtaactgcggaggaagctgtacctgcggccaaacatttgcgtgaagtatggagtgcagttcgggtctaaccaaacccaggatgaggtattgcataccgaagctaaagtagctgaaaaacctttgcgagtgcaaaggttttttttggtacagaaatcgataatgtacatatttaatttttcttatcggaacaatcggaaataagtcttttcaaatgcgacatcttgtgagagaatatggaaaacatacgccaccatgcgaagacatcaggaacttaaagaacgtatatattgagggaggattcagatttatgtcaaacgaacgtgagctttcatttgaaacattggcaattcatgcaggccaggagattgatccaaccaccaacgcacgagctgtgcccttgtatcagacaacatcgtatggattcaaggacaccgagcatgcagctaacttgtttggtttgaaagagtttggcaacatttatacccgtctgatgaatccaacaaccgacgtgtttgagcaacggattgcggcgttggaaggcggagctggagcgctggctacagcttctggtcaggcagccattacgttttcacttctgaatattgctggtgcaggtgatgagatcgtatcttcggcgagtttgtatggaggtacatacaatctgttctcgacgactttgccgaaactgggtctggacgtaaaatttgtggattccagtgatcctgagaatttccgggcagcgattacggagaaaacgaaagcattgtatgccgaaacgattggtaatccgaaggggaatgtactggatattgaagcggtggcagcgattgctcatgaacatggaattcctttgattgtggataatacgttcccaagtccgtacctgcttcgtcccatcgaacatggagcagatattgtcgttcactctgcaacgaaatttattggcggtcatggtacatccattggtggcgttatcgtggatagcggaaaatttgactggaaagcaagtggcaagttccctggattgacggagccggactccagttataacggtgttgtatatacggaagcggttggaccgattgcttatattatcaaagctcgtgtacagctattgcgtgacctgggtgcaacaatctctccattcaactcctggttgctgctgcaaggactggagacattacatctgcgcgtagagcgacatagtagcaatgcccttgcggttgcggaattccttgagaaacatgaggacgtgtcttgggtaagttatgcaggtctgccgagccacggttcttacgagcttgcacagaagtatctgccaagagggcagggtgccattctgacctttggaatcaaaggtggtgcggacgcaggtcgcaaattgattgaaagtgtcaaactgttctctcaccttgcaaacgtgggcgattccaagtcactgattattcacccggcaagtacaacacacgcgcagttgaccgaagatgaacaaactgcagcaggcgttaatccggaattgattcgtttgtctgttggtaccgagaacattcaagacattatctatgatctggagcaagccatcaaggcaagtcagggagcaagcgtaggcgcgtaaatggcatttggatgaatcacttaagtgatatgccataaacaggtcatatgaatatcaatagatggttaaagccgttgtcccccgggacagcggctttttgtctttttgaacacgcatgtatgactatccatcgaaaaagcccatttacaaatgtggatcacaggcatatactgattgaaagttgtattgagtaaacacaattgcataagtgcaaaaatgattatcattctcattcgagattatgtcaaaatcattcataaaaccatgctgctgcgggattcccgcagcagcatgtgtcatttttagggcattaacaatggctctcattctcaatacaacttcatttttgggagcggaatttagcagactcgtcatccgcaaacctaccattcgaaaggaacgtgattcatatgcaagcgatacatcaaccactacacagacagaaacaagcgggacagcgcttatcccaaacaccaggcccaaaccggggacgtaagcctgattttcgagccatgttgcagaataaagagatgcaatctgcattgggcagcgggctgttgatgctgattgcctggggaactgcaccgtatttcgggactttgtccatcatgctctacattgtggcgtatgccgttggcggttggaacaaagcgaaggaaggtatcgagacactggtcaaggaacgtgatctggatgtaaacctgctgatgattgccgcatccctcggggcagcagccattggttactggaatgaaggtgcgatgctgatctttatttttgcactcagtggtgcgttggaaagttatgcgacagagcgcagtcataaggatatctcatctttactggcgctgaagccagagactgcactgcgtattgaggatggacagatgaacctcgtggctattgatgatctgcaacctggtgatctgctattggtcaaaccgggagaactcatcccagcagatggtgtcgtgtaccgtgggagttcttttatcaatcagtcgtccatcaccggagaatccctgcctgtggacaaagttgcgggggatgaagtctatgcaggtacggtaaacggggtgggtgctttatacgtagaggttacaaaatcggctgaagggtcactgtttggcaaaatcattaaaatggtggaagaagcgcaggcagaagtgccggattcccagcgttttatggagcggtttgaaggaatttacgcacgcattgttgtaggggtgactttacttgtgattgcaggaactccactactgcttggctggacatggaatgaggcattttataaagccatggtgtttctggttgttgcttcaccttgtgcattggtgtctgccatcatgcctgtcatgttgtccgcgatgtccagcagtgcgcgccgtggcattctcttcaagggtggtgcccatatggagaatatggctcgcacgcgggtcgtggcttttgacaaaacaggtacattgaccatgggcaccccgcaagtcaccgatattattacggctgaacatgtagatcgtacccagctgttagctgcggtagcggcgattgagaacctctccatgcaccccttggctcgtgccatcgtagatcaggcgaacaaggaaaacattacacttcaggaagcagagcacgtacaggctctaacaggctggggcatcgaaggaacggtaaacgatgtggtctggagcattggcaaaacaaatgtaatggaatcgttgcagttagagaagataaaggacgctaacgttgatgattcagatgaacatgatgttaaccctgtgaaagtatcttctgagtggggtgatgtatgctctcgtcttgaaggggagggaaaaaccgtatccgctgttatggctgatggtgaattagtcgggctgatcgcgatgcgggacacggtacggccacaggcagcagctgcagtgaaaaagcttgaagcgatgggtgtaaaagttaccatgttaacaggagatcgagccagatcagcttctgtaattgcgcgtgaaactggagtaagcatggtctatgcagacttgctgcctggagataaggtgaagcaggtacaagcactccgcaaacagtatggtcctgtgctgatggtaggggatggtgtcaatgatgcaccggcacttgcagcagctactgtgggtatggggatgggattgtccggcagcgggactgcactggaggtcgctgatgcggtacttatgaacgataacattgaagagatcgcttgggtgattgggcaggctcgtcgagcacagcgcacggtgaagcagaatatgttttttgccatcaccgttattctggctttgattgttggtaacttcctccaagacgttgcattgcctctgggtgtggtaggtcatgaaggcagtacaattctggttattctaaatgggcttagactgctacggtaataagatttgaagaggaaaatgagtaattggtttcgctggtagtatgcggctggtggaacagcttacgtttgaaccttgggtcagcgggtaatgattcgaagagacgattcgataataagggagctgtgaaatatgggacgttatgtacaagtggaaccaaatgtaaaagtatatgttgaagatattggcgaaggaaccccggttgtctttttgcacggctggcctgttaattataaaatgtttgaataccaattgaacgtactgccgaaccatggcattcgtgccatcgcgatagattttagaggatatggcttatcggataagccttccacaggatatgattatgatcgcatggcagacgatgttcgtgccgttattgatgatttggagctgaaagacgcggtactcgcaggattctctatgggtggagcgatcgcagtacattacatggctcgccataagggacatggcgtctccaagctggccttgttatctgcggcagcacctgtgttcacacagcgtgaaggttatccgtatggattgactccagagcagctgaacgagcagatcattgagccaatctttgcagatcgtccgaagttactggagacgtttggcggcatgttcttcgcaaagaaacacagccaggcattcatggattggttccacgctctcggcatggaagcttcatcttatggtaccattcgcagtgcaattgcgttgcgggacgaggacttgcgaggtgacctgagttccattcaggtgccaacagccattttgcacgggaaaaaagatgagatctgtccgtttgagttcgccgagcagatgcaccaaggcatcgcttcgtctcagctgattgcttttgaagagagtggtcatggtgcattctatgatgaattggaaaaattcaattcggaattgattcgtttcatccaatcctgatcaggagagggcataatacctctgacagacgatcccagtaatttcatggaatcttcatttgtggctaaacaaagaacccggttgacagtcttggactgttcgccgggttctttagtcttcaattaaaacagttcggtcagaccaatcatcgtgatgagcccgagtaaaaaggacatcgtcgccacacgtgcattgccatcgccgtgactctcgggaataagttccttataaacaatgaacatcatcgcaccggctgcaaaggccagaccataaggcacaagaccagctacgagactgctcaaggtgtaaccaatcatagctgtaataatctctaccgctccggtcagggtggcaatacccagcgctttgaagcggccaatgttctggtttactaggaaaagggccaccagaaatccttccggcgcattctgcaatccaatggaaaaggcaatgagattgccaaggttctcatccgagcttgcatagctgactccaacggataacccttccggcagattatgcatggtgatggctgcaataatcatgaaggctttggtttcaattttaaaaggcattttctcgggattctccagatcgacgtgtgggatcttcatctccagcaccagtagaaccaggctaccaagcataataccaaatgcaagtacaaagagattcgattggccaagcgcttccggaatgagattatacaccgaggccgaggtcataatacctgcggcgtatgccagcaagatatcacgcagacggtgcgatattttgcgcataaatagaatcggtacggcccctaggccggtagacatggctgatataaaactgccaatgagtgcatcgttcatgcttccattttccctcctgatgaagacttcttcataatcgctgccgagcattgacaccgtacataaaagagatcataatgaacaacagattagaatgattataaattagaattccgtttctgcatagggccattgtcatatcacaggcaggtcttgtggacatgatgtgggcttttcgttctagtgtatgcaaaagcctaagcttttgatgccggagggtctaacctttttgcagaacccgggggaggaactatacatgtataaatcaattattattggaacaggccctgcagggctgacagcagcaatctatctggcacgtgccaacatgaacccactcgttattgaaggaccacaacctggtggccaactgacaacaacgactgaagtggagaacttcccaggtttccctgatggtattatgggtcctgaactgatggacaacatgcgtaaacaagcggagcgcttcggtgctgaattccgcacaggctgggtgaacaacatcgacatgagcgagcgtccattcaagattcaagttgaaggtatgggtgaactcgtatcggaaacattgatcctgtccacaggcgcaactgctaaatacctgggtatccctggcgaagaaacgaatataggccgcggtgtcagcacatgtgcaacatgtgatggattcttcttccgtaacaaagaaatcatcgtcatcggcggtggcgactctgcccttgaggaagcaagcttcttgtcccgtttcggttccaaagtaacactggtacaccgtcgtgaagaactgcgtggctccaaaatcatgcaggatcgtgcacgcagcaacgaaaaagtagaaatggctttgaaccgtacaccactcgaagtacttgctggcgacaacggcgtaaccggactgaaagtgttaaacaacgaaacaggtgaagaagaagtgattccggcaagtggcgtattcgtagcgatcggtcacacaccaaacactggtttccttggcggacagatcactacggacgaacatggatatatcctgactacaccaggtacatccgagacaaacatcccaggtgtattcgcatgtggtgacgttcaggatacacgttacaaacaagcgattacagctgcaggtagcggatgtatggctgccatggacacagagaaatacattgagagcttggagcacagcgcagttgttctgtaatagaatgagctgattccaaccaaactatagattaatataaaaccatatgaggtgaattaaacatggaaaacgtaattgtatatacatcaacgaactgcccgaactgcaaatccgtaaaaacgttcctggctgacaaaggtatctcttatgaagagcgcaacatcgaaactagcgatgaatttgcacaacaagtatgggacatgggtgtacgtgccgtgccattgactgtcattggtgaacaccgcattctgggtatgaacaaaactcaatttgccaaagcattggacgcttaaatcaggctgattatctgaatcatcatgtgttgaaagaaattttcgattcatatgcaattccggttttcgcgagccgttaggatatagaaagaaccgtacccggaagggtacggttttttgtgcaaacgcagaatatgatctagaaaaaaatactcatgaaagtttgaaatacaacataaaccagcaatcctgacagcatgtacatgaaaccagccttctttttgctctgaaacaatcggagtatgccaaggctgaacaggggcgcaagcacaatcaggaacaggaggacggtgacaaacatttgcgccgagatatctgaagtatccacgtaggtcacgctttttttcactccgtttcgttatcggaattaacacagctttattcatacagccatgacaaaaatcacataaccccattatacatctggatttctttaacaaaaagggaggaaatggggcgaaatgatgtcaattttcatctgttattagacagacaccctgattttacctaaaaactgggatattgcagagtaagcggcaccaacacgggtggaacggctgcccagagctgcccattcaatctgcaaactgcggcggtgataaggtaatgtacgttcctcgacaacttgttttaacgctgtttcaatccatggacctgcttcagagagcggaccgccaatgataatacgttccgggttgaaactgttaacgatgttggttatgccaatccccagtttgcgtccaatcgtgttgtataatttctgaacagcatcgtggccttgctccgcataatgaataagctcgcgtgtggtatgagcaggtaaatttagctgatggtccgggtgctcgtaggctttttccgatgcgtataactcccagcaaccacgattaccacaggagcagggcagaccttccgcttcaatggacatatggcctgtttcccctgcgtagccccacgcacctttgtataattcaccatccaccatgatgcctgaaccaatccccatgcctgcactgatgtagatcatgtgacggacaccgatacctgccccaaaattcaactctccatgagcaccagcattggcttcattatcgatcgttacaggcagttgaaattcttcttcaagcatcgagcgcagagctaccttctcccaccccaggttgggtgcaaacaggaccgttcctgcctcatccaccatgccgggcacgccgataccaataccaatcacaccgtgaggggaagcaggagctgcttcaatgagctgttttgctgccaatttcaattgctccagtacagaggacacgtcatgatgttccaaggtcactgcgtactctgtaatgatgtgtccttccagatctgtaagcacgcctttcaaatgggtcacactgagttccagaccgactgcatagcctgatgtccctcggaacagcagcatgagtggtttacgtccgccgctggattcaccagggccaatctcctgcaccaggtcatcactgatcagatcagcaaccaggttggataccgttgctttgttcagccccgtaacctcggacacgcgtgcgcgagaaagaggggcatggcgccggatcgtatcgagaacgatcgacttgtttatttttttgaccagcatctggtctccggtaattttcatatggttaaggcactcctattcttctgataaaagggttctgacccacatccgaaacaagttattcgactattatagcgtaaacaaacatgtaaaaaacaattttgttttactttgtttaaccaatagacaaagtaaattcgatgtgataggataacggtgtaaacgatttcttaaaactattgaggaggcattttacacatggcctattttgaatccgttaataaaattgcattcgaaggtaaagattccaagaatccttttgcttttaaacattataatccggaagaagtggtagccggcaaatcgatggaagaacatttccgtttcggcatggcttactggcatacattaactgcaggcggcagtgacccgtttggtgcggagacagctgttcgttcgtgggataaatactcgggtctggacctcgcgaaagtacgcgtggaagcggcatttgaatttttggaaaaaatgaatctcccgttcttctgtttccacgatgtggacattgcaccagaaggcaacaacctgcgtgagttctacagcaacattgatacgattgttgatctgattgaagatcatatgaaatccagcggcaaaaaactgctctggaacacggcgaacatgttctcgaacccacgcttcatgtttggtgcggcttctacttgcaacgcagacgtgtacgctcacgctgcagcacagatcaaaaaaggtctggaagttggtaaacgtctgggcgctgaaaactatgtattctggggcggtcgtgaaggttacgacacattgctgaatacagacatgcaactggagcaagacaacattgctcgcatgttccacatggctgtagactacgcgaaggaaattggctttgatgcacaattcctgatcgagcctaaaccaaaagagccaacgaaacaccaatatgattatgatgcagcaacttccattgctttcttgcaaaaatacggtttggacaaacacttcaaactcaacctggaagcgaaccacgctacactggctggtcatacatttgatcacgaaatccgcgttgctcgtacaaacggtatgctcggttccctcgatgcgaaccaaggcgacatgttgatcggttgggatacggacgagttcccggttgatatgtacgatgctacattgacaatgtatgaagtattgaaaaacggcggtatcggccgtggtggtgtgaactttgacgcgaaagtacgtcgtggttccttcgaagctgacgatctgttcttggcacacatcgcaggtatggatacgtatgcaaaaggtctgaaagtagcagcgaagttgatcgaagatcgtgtattcgatgacttcatcgaaaaacgttacagcagcttcagcgaaggtattggtgcagatgtggttgcaggtaaagcaacattggcttcccttgctgagtatgcgttgaacaacgaaagcccacgcaaaaaccaatccggacgtcaggaattgctgagagcacaacttaaccagtacattctggctgactaatagcggattaggcagggttggtgaacgtcgaccaccgatggttactcaactcatatgtgttgatcattagtatccaagcttgcctatgcacaagattagcttgtaccatggaacgcctgaacaagcatgacattcggaccgtccccgactttcccttgggaagacgggggcggttttttggttaaacaaataacatggtttttaagatttttgatataaatgtttctttaagatggtgcatgcaaaacggagtgagcagaaaggacccgaggaagcggagcgtgcgcatttatccccggatttgtcccttgtcaaagggattaaaggaaatccgggggtaacggcgatccaagggttttctgatcacgaagtgaccatatgagcattagggtttcatttataaccaatgacgaatcaaggttattggatcaatctttctgctacaaaaacgagtatgtttttactgttttgatataaatggttgtctaagatggtgcatgcaaaacggagtgagcagaaaggacccgaggaagcggagcgtgcgcatttatccccggatttctcccttgtcaaagggattaaaggaaatccgggggtaacggcgatccaagggttttctgatcacgaagtgaccacatgagcattagggtttcatttatacaatcctgttacaaacgagaggagttaacctatgagttacgtaattggcgtcgatcttggaaccagtgcggtcaaaaccgtgttggtcaatcgtgaaggaaaagtggcatttgaagcatccgaggcatacccgttgtaccagcccaaggctggatacagtgaacaaaatcccgaagattgggtagagcagaccattgtttccttgcgtaaattgcttgaagtatctggcgtgcagccttcggaaatcgagggattgagcttctccggtcagatgcatggactggtcttggtggatgcagaaggtaaaccgctgcgtaacgcaatcctgtggaacgatacacgtactacggctcagtgccgtcgcatcgaaaaagtgctggaaggcaagctgttaagtattgcccggaaccgtgcactggaaggattcaccttgccgaaaattctgtgggttcaggagaacgagccggaattgttacagcaagcatccttgttcctgttgcctaaagactatgtgcgttatcgcctgaccggggattacgctatggattattctgatgcagcgggaactttgctgctggacgttgcaggcaaacagtggagcaacgagattgcagaagctttcgagctgccaatctctctttgtccacgtcttgtggaatcgtttgaggaagtgggcacgttgctgcctgagattgcggatcaaacgggtctagctgctgcaacaaaagtatacgcaggtggtgcggataatgcgtgtggtgccattggcgcaggcattctgagtgaaggacagacgatgtgcagcatcggaacgtccggggttgtgctttcctacgaagagcgtaaagatctcgacttcgaaggcaaagtacacttttttaaccacggagagaaagatgccttctatattatgggtgtaacgcttgccgcaggatatagcctgtcctggttcaaggatacgtttgcagcggacaaatcgtttgatgtgctcttgcagggcatcgatcagattccggcgggcagcaacggattgttgttcacaccatatatcgttggggagcgtacacctcatccggatgcgaatatccgtggcagtttcatcggtatggatgcagggcacaagctggagcactttggacgtgcggtgatggagggcattaccttctcgctacgcgagtccattgatattctgcgtggtgcaggcaaaaccgtcaatgaagtcatctccattggtggcggcgccaagaacgaagcttggttgcaaatgcaggctgatgtctttaacgccacgattgtgaagctggagagcgaacagggtccagcgatgggtgcagcgatgctggctgcctatggctgtggctggttcccgtctttgcaagaatgtgcaacagcgtttattcgtccagcgaagtcctatgagccgaacccggaaacggttgccgtctatgatggactgttcgcactgtatcaggaagtctatggacagacacgtagtctcaatgatcgtttggctgaataccgttaattcatttatttcactacattaatcttgtgattacatttaaaagcatccgcgaaggcgggtgcttttttgtcgttcatcaagattaaccccatgaaaggtttctttggcctgcatatccgcattccggctctgcatagattggaaatagaggattgtgattcgtccaggcatcgtgtgtcggacattttaataggtagaagcttgagcatgggggtgaagctttggatggacatgaggaacatggaagaccacagattaccttgtcgatgatcgttcgtaatgaagagaatcgttatctcaggcaggcactggagagacatcgtccctggattgatcgcgcagtaatcattgatgacggaagcacggatgcaacggtcgggctgtgcagggaacttctggacggtattccactcgtattagtggagaacgctgcttcacgttttgcagacgaggtaagcctgagaaaacaacaatgggaagagacggtggcgaccgatccggagtggattttgaatctggatgcggatgagattctaaccagtgactttggggtggtacgggatctgctgctcagtggcaatgaagatgcgatctatttcagattgtttgatatgtggagtgagacgcattaccgagaagatgagttctggcaggcgcatgcctattatcggccatttctgattcgttatcacccggggatgaactatgaatggaaggagacaccccagcattgtggtcgttttccgttaacgatccaacattggtcctatggatgtcatgctccccgggtgaagcactatggttgggcgcgggaagaagaccgtatccgcaaatatgaacgctatcaagcactggaccctgaagcaagatacggttggaaggaacagtacgaatcgatattggatcaggagccacgactgttggcatggttcgaataaggagagggggagtgagcacattgaagaaagaccctttacgcaaatcggaagaagaatcccaacctcaaatagagttgaatacacatgagaaagagaatcaaaaagagaagcaacatgagagccagaaagagagccagagtaatcatcgaccgcccagactttctgataattcactggaaacccgccaatcggaagagcatgaagcgtttgagcaagaaagaatactgatcgccagcccgattcgccagacaactccggttctccgtgaatttctggattctctgcatgcactggaacgaacaacagtaaagacggattatctgtttgttgacgataacgtggaagaagccgcatcgaatatattgcatgaatttgtgcttcagcatgaagggacggttattcaagcagatgaacatggtagcggtagtcctgacaacaaaggggtgtacagcaaggatgagggaggacactattggcaggatgagcagatttggcgtgtagccggtttgaaaaatcgcatattgcaatatgcacgcgacaatcactatgatgcagttttcctgattgattctgacttggtgctgcatccgcggacgctggagcaacttgtatcgagtggcaaagacattgtatccaatatcttttggacccgctggcagccggatgccagggaaatgccgcaggtatggctgcaagatgagtatgctttatttcgccgcggtggcaaaacagtagacggaaccgagacggaagacgagggcacgcaaacgactgcttttctaaatcagctacggatcccgggttgttatgaagttggagggctaggggcatgtacccttattcgcaaaaatgttctggcagcaggagtctcatatgaccagattcccaatgtatccttctggggcgaagatcgtcatttctgcatccgtgctcaggcactgggttttcgtttgttcgttgatactcatttccctgcgtaccacatctatcgattgtccgaactgccaggggtttccgcctttaatcgcagggcgagaagaggtgaggagacgatcagtattaccctgtgtatgattgtgaaaaatgaagaagcttccctcgccagatgtctggactcggtcaacggtattgccgatgagattgtaatcgtggataccggatcaacggatcgtactcgtcagatcgcttccagatatacggatcgtatcgttgattttgaatgggtggatgactttgcagcagcacgaaactttgccttcgatcaggcaaagagtgaatatattctgtggctggatgcagacgatgtgttcgaaccggaagatcgggcgaaactgatcgccttgaaacgttcgctggacccggatgttgatagtgtgacgatggattacaatctgtcattcacagcagatggcaaggtagcctacagcctgcgccggaatcgtctggtgcgtcgggatcggcaatttcgctggattggcgcggtgcatgaatatctggctgtagcgggcaatctgctgcatagtgatatagcggttacccacaagaaagataaggagtataccgatcggaatctgcggatctatcgtaaaagggaacaggccggagaggaatttgggccgcgtgacttgtactatttcggtaatgaactgaaggaccatggacagcatgaggatgcggtgaagtactatgagaagtttctggataccggactgggctgggtggaagatcagatcgctgcttgccagaaaattgcggattgtgaagctgcacttgaacatccggaacaggaagtcacggcgttgttccgatcatttgcctatgatttgccaagagccgagatttgctgtcgattgggtggttattttgccgaccgtgaagattatcgcaaggccctgttctggtacgaacaggcgactcgtgctgtacgtcctgatgaccctatggtagtgctgaatgaagcagcttggacctggatgccgcatctgcaactatgtgtgtgttatgaccggatgggtaaccgtgccaaggcccgggaacataatgatatcgcactcgcctatcatccaacacatccaagcatgttatataacgatcgatactttaaagatttggagaaggataacgtattggaaaatgcctaaagcatgcatatagattggaactgtaggtatagatattgctggaacagttgtttgtaacaagagcctcctctgatgaaagagtggacgcaatgtgccacttttatgagagggggttattgacgtaattgtattaaaggagttattgtagatatattaagtcttttattagggaggaatgagatgatgaagtattccaaagctaccaattacgccctgcacacgatgctttttcttgcggcatccaattcagataaacctgtgggtgtgcagcaactttcaaagtggcagaatgtttcacccacatatctgtccaagattttaaccaaattgacgaaagaggggatgattcattcttcatctggtgcccatggcgggtatacacttcaggagaagtgggaggatcttacgtttttggacatcatacaggccattgagggtacaacctctctgtttgattgctgtcatcataaacagggatgcttaattcaagaaaccatgatcactgccgaaggacagatggaagaagtgcttaaaaatcgaaaattatcttcaattgccggtaaaatatcaatgatgcattaagtattttttttgtatttataatagatataatttgtcttttatatctattataaatttcgacaaacgaatatatccagaagatttcacacactattcttttgaataaaggagactgaaatgaattcatttattatctatttattggctttaggagcctttgttgtgggaacagccgaatttgtcgtatctggcgttttagatatcattgcccgcgatttacaggtttcgatctcattagcgggacaattggtcaccgtatatgcactatctcatgcattgggtgcctgggctctggtcatgctgacttccaagttacaacgtaaaaaagtacttctgtattccatgcttatttttatcttgggaaatatcattgcattcttcagtttgaactttggcatgcttatgttctcacgcatcgtattggccatgagtggtggtctatattttgtcctagccacgaactatgctgcaagactagctccttctggcaaacagggtagtgccattgcaactgtcatcacaggattcaccgtttcattggtattaggagtgccgattggtaccttcattgctgcctacatggattggcactacgtttatatcatgattgcaattatcgcatttattaatttcatgctgttgtacagatttattcctcgaatggagggtaacccgtctctctccctgaagcaacaattattgattatcaaagataaaaaggttatcaccggattattaacgactgttttctggattctgggttacaccatggtatttgcttatatcgctccacttttaagttctgtagccgatttttcaatagaaatgattagtacggcgttacttgtattgggtgtatttgcattcataggttcccgtcttggtggctatgcggtagatcgatggggacctgttcgcacgattccaatcagtttgattattcatgctggtgccctctttattttgccaatcacagcaggttccacaataggtattcttctgaccatcatgatttggggcacagctgcctggataacaacgcccgcgaatcagttctatttgataacattgagaccacagtcttctgaaacagtcctgagttacaatacggcagtaatgaacataggtatgactttcggtgccggattgggaggtgtagttgtgaaatacaattccgttcaaaatttggggtggattggtggtatggtcctgctgttggcgttggcgattgcccttgtttccttcaggttgactacaaaaccaagttgaattcaatgtctttttaaaagcaagaagtgaatattggatcaaatgatttcatccaggagaggatatgccttacaataatgaataacggaaaagcggtgaccatgattgcctgtcttcggctgccgaattgatgaagcaaggggaactggatatgaatttgacggaagtactattggagtcaaggctagttgcgattgtgcgcggtataagccgcgaagcggcagtaacagctggacaaggtatgacaggtggcggcatccgactaatggaagtcacactgaacacacctggagcacatgctattattgcagactggcgtgagcggcatgaaggaaaggcttatgttggagcgggtacggtactgaatgtgcagatggcgaaggaagccgtcgctgcaggagcacaatttctggtatctcccaatgtcgatctgtctgtcattgaatatgctgtagaacatggtgtcgagatctggcctggagccatgacacctacggagattgtcgctgcccacgaagcgggagctcgagttgtgaagttgtttccgatggcgagtctgggtataccgtatctgcgggagatcaaagctccactgaatcatattccactgctggcaacaggtggtgccacactggagaatattgctgattattacgcagcaggcgctgctgcagtgggtctgggaagtgcacttttaccacgagaagctcttgtggcaggagatcatgagcagattgcagcatgtgcacggagatttgtggaagcagccgaagcctaggcaccagcgttagatgagggatatgtatatttgggtatatatatgaaggtgcctttagattaattgttggatcaatctttatcataaaaacccatgtcgcttaacgtgccgttcattctattgttttatgatggatgtatgccagaattcggagaggagagatgccctgtgaaagctaaaacaatgataggcggcatgctcgccgtggccgcagtaacggcaggtggtttatggaaggcagcggtaaagagccagacacccaagaagattccaatcacactcacacccccaatgccatttgaggatgtgacctttgacagtgggggaggtcgggtgcatggctggttcatccccgccagagccgacattccgaaaccatggccgctcgttattattgcacatggctggggctccaatcgctcccgtgttcttcgttacgcacgtccgatctgggaagctggatatgccttatttatgtatgatgtgcgtagtcatggggccagtgatccggttcgtgctgcatctgcctacctgttccgggatgatctgctcgcggcattgcagtatacgactgcacgaccagagattgatgcggatgccatcggagtgcttggacattctttgggtggattgggtacgattcttgcagtgacggagggaattcctgtatcagcagtgattacggactcgatgccatcgcaatttgaagtaatcgtcagttcagagctgagacgccgacgtctgcccttgtttccactggcccagttaattccgagaatctggttctggcgactgggtgaatctctgaaatcttatcgtcagcgtgatccggtgatgatgctgaatgaacggcgcagggggatgcaactgccgatgcttatggtgcactccaagggagataatttcattcccccgagtgagcttgaatattttatgtccaaagccgatccgcctgttgaacatctatgggtcaacagcggaggacacagttgttctgaggaagatcccaccttctgggacaccgttattccctttttgaaaacccatgtccaaggtcaggcgaagttgaacgattcgtctaaagcgagtagttgacaaggtagattcagcctacataagagtgcaggctaacagagaaaacgccaacgtggttggcgttttttttgctgttactagcaatatgcagaaattcacatttgtaaaattgccccgaaaacgacgattaaaaaggaagcttatggtatcatagaatagactggcaatattcatgcgaggttatttgttatgcttctttgtatgaaattgaagggagaggtccagatttgagtttgaattggaagtttaatttacgattgaaaatgttcgcaaccaaagcaacaaccgcagcgatggcaacactgctgcttgcttcgcaaacaccaggttttgcaggcagtgcatcagccgcgcaagcagagcagttgaccgcagcgacaacgggggaaaatgaacaactagacgcaacgagcaatgacgtgcctgagggagcgaaaatctcatccaggcaagccagtgaaaatatactgaaattatttccattattaaaaaaagcaacgatctcatctgcacgattcgattcacctaattcctatccaccgccagactacaaggcgtgggagatcgggttccagattacacaaggtaatcatacgtccggattcagtggaactgtacatgcaggcacaggggaagtgttaagtgtacatttgccgtcggatatcctggataaacatgtctcggaatcagatgtgaagttaaccaaagctcaagctgaagaaaaggccgtggcattgttgtaccaagcgattccaggacttaaggaaagtgaatatgctccgcttggagatctgtattcttttattgaacaagagtcattgtttggcagaacagagtatcgatacgggtaccagttaaaacatgatggattgttaactgacgcagagacagtctacattaatgtggatgaaagtggtttggtgacaggttactcacgaggtactatcgaagccaagtatccctcatcgaaaccggcagcttcagaagagaaggccagacagcagtttgaagaacagttcgatgtggaactggcttatatcgccaaagatcgtctatcttccaaacagggtcagcagtattaccttgcatatacaccaaaaaatatcagtatcgttccgattgaagccaatacgttggaacggattaatacattaacaggtaaagctgtagatgaagattctttgcagcaggatacgaagttaaaaggtgatgtaacgccttttgtcccggccaatggtacgaggttaaatgtgcagcaggccgccaatcgggtcgcaacaaactttgatattcccaagggatataagctggagcataaccagttgggcaagggatattactcaagtccgaacaatcaggtgtggagtctgagctggagcgatcgaagtgccaatatgtcctatatgttcatgcgggatatctcagcacaggttgatgcagttaccgggcagatctacagttatacgatgatgcaacgaatgggaccggagatggaacaggagaagccggctgaggagaaggcaggcaaattggtaacccggaagcaggctgagaaactggcgatggacacggtgattgcgctagttccagacgcaacggagcagttccgactggctaacgtgattgaggtggatgatgctcgcacatttttgttccagcgttatctgaacggaattccggttaaggaagatacggcacaagtacaggtgttaaacaacgggacgattaacgagttctatacacgtattgcggcaacgcctgaacaactgccagcagatgttaagccagccatcagttatgaagaggccaaggcactctatctggaggaattcaagctgatcctcgcatattcccgttatggcggatatggtatgaacggtggtcaagtcatcccagcgggggtgaaccttgcttatatgcctacacgtgatgagaattcgatctatggcaactatgaagcgctggatgcgaacacaggggagtggaagcttttatacggggacacaagctctgcaaccaaggctgaacctacggatatcttgggtcatgtggccgaagcagctctacgcaatatgacacagcatggcgtattgcttgctgatgaacagggacgcgtattcccggatcgtgtgatcacccgaggagattggtttaactatctggcaagagcgattaatccaaatatggatctgtactacagtggggacggagatgacaagttatacgctgatgtgacacctgacagcccgtattataaggcagttcgggcattaatcgatcagcgctggcttgccggagcggaccctgaacagaatttgaatccgcaggaagagatgacacgtgaagaattggcagtgctgcttgtacgtattttacgctatgagaagctggccggattctatacgttgccatcggatcttcccaacattgcggatgccagtgccattacaagtaagggagcggtttccctgagtctgaagctgggattgcttccttcgattgaaggacggttcatgcctgcacgcaaagtgacggtagctgaagcgtcacaggtattggaacggctggcgaagcttcaaggtaaaacagatacatttatgagtggtaatcgcctgtattagacgaggaatcactcatatcatgcccaagcgaatcataggatgaagataacgggtaatcgtgattcaatgaactaaagatcaaagggaccttccatagaaggtctcttttgatttgcttttacaaaactagaatgacgacagacccttttgtgatacaatagggcgtgagaactttgcaaagaagggtgggttcctttcatgggtaagaacgggaaacgaattatcaccatactgctggcaggctgtctgattgctgtagcgttaccacgtacggttgatctggatcaactgtatgctgcatcagggacatcggatatatccacggcaacagatttgcgccagaccttgcttaccgcaatgtcacagcgaacggaggaacttgtttttacatacaaaggcaatgtgaaaggcctcaaaaaacaattacaaacctccatcgatgaggcaatgaagagtgacccctatatccaatataccgttaaaagttatgcatttaattataaaggatccaatgtgtccgccgaggtgcatgtgactctctcctatcgggagaccaaggagcagacggattatgtgaatcgtaaagtcacaaacgtgttgaaagaaatcatcaaaccaggcatgacggatcatgagaaggtcaaggtcatccatgactggattgtgcttaacctttcctacgatacttcgctcaagaaatatacggcctacgacgggcttgttacaggcagtaccgtatgtcagggatattcactgttggcctatcggatgctggagcgagtaggtgtcgataaccggattgtggaaggtacagcaggtgggcagcttcatgcctggaatatcgtgaacctggacggcaagtggtatcacatggacaccacctgggatgatcctacccctgaccgcaaaggtaaggtgagccacagctattatttgctgagtgatgatgagatggcacgtgaccatatctggacaggcaaaagcaagtaccccgctgcgccagccccatatcgagaagctttattaaagctggtgaaggctggagatagcaaaaaagccgcttatcagaagctgtaccacgctctcgactattccctgtatgatgaagaggatgcggttaaaggccatgctgccctgaagaccaaggttcagagtaagctgaaggaaggcggaacctcgctgacattcaggtacaagggtacggaggctgggctgattgaagatttgcaggatttgtaccaacttggcatgaaatcgatatcttattatgtgtccaaaatggaaggtactaccgatctgcgcgtcaaaattaactggacaatataacaaccatttgaacaggatgctccgattgaggagtatccttttttgtgttcaattttgtgtccaaaagcgaggattttagtgttgtctattttttgtatatgtcgctttgctattctaatcttcggcgtatgccaacactacgtacgaggaggatatgcaaaaaatgaggaaaaaagtgagcatagtgatcattgctctgttactggtcacgcaaatgatgcagggttggatatttacaccaacaatgcatgctcaggatgaattaactaacttgccagccagtgcaatcagcgatacagcgtcagaagaaggtttggcaggttcggaagaggtcaacaacgttgacgttgctgccactccggaagaagagggggagggaaacctcaaccagagcagtttagcaatcgcagctgcaggcccggtaattacagatcaattgattaccagtgtgcagatgtacaatcaggcaccagaagacaacgggaatgggacgattgaagtcaaaggagataaagtcgaggatattcgaccacgcattcaggatgaggtggctgtagtctttacatggggacttgcagatgacaaccacaactacagcgatggctctacgttcacctttaacttgcccgataaattcatcattggatcgcagcttaagggtaatctggatggcggtgttggagagtatgtggtgaatccagatggcacaatcatctttacctttaatgaactgatcgagcatgagaagctggaaggcaacttctacgtgtggattaagtttgatgagagcaagatggtagatggtttgaaacaacagatagactttagttccgtagggcagggcatcattgatgtacattttgccaacacagccgtagataagttgaagaaatcgggaagcgcaaacaaagacaacttcaactcggatgaaattaaatggaccgtagattttaaccaaggcgagaaggctatgaaaaatgctgttcttgcagacacatttccagcagagctggagctcaagggcaatatcgaaattcgcgaattggaagtgcaattgaatggatctgtaaaagaaggcccagtagttcaaacggaaccacagtttccaattcaattgggagatacagataaggcctatcgtgtaacctatacgacaagtgttaaagcaccaaccactgctccgttcaccaacgtggagtatcaaaaccaggttgcgcttacaacggatcagagcgagcacgacgaaacagatattggccgagttcgtgtgagttttaatgagcctttgaacaagtcagggcaagatagtgcgtatgatccggtgacacagacgattacatggaaagtgcaatataactacaatcagcaagaaatcatgcaaacgaatgcatggattgaagaccgctttgatacggcaaaacagcaactgatcaacaattccgtcaaagtgtatcaagtggacattaatgcaagtggagcggcttcgaacagaacactgatcaatccaaatgaatacacactcgaagcgatgggtacagggttcgatgatggcttcagattacattttaagaacgatattacaaaggcctatgagatcgaatatgatacacaatccattcatcgtgtttatacaaacgacaccattacgaacacagtgaacatgtatgatggtacttccaaaacagggcgaagagacattcaggaggtcatttttgcaaagagtgtaaaaagtgaaaacttcaacacaaaagaaatcgaatggcagattgttttgaaccgtgatttgcaggacatgacggatatcgtcatcaccgacaattacgaaggcagacatatgaaactgattccgggtagtcttcaagtgagtggtgttaacaaaggcgactttgaactgactccagacccggctgatccaacgtatgaaaaaggattctcacttcgcttgaaggacggcgtaacgctcagtacggagcatgttattacttataagacaagcttcgatcccacagcgggtatgccaacgaatgatgaatatcgcaactcagccaagatcgattgggaagagtctgatgtaaaacagacggcgattaccaaatctgctgcggtcaaaccgcaagactacacgattcaaaatggtaacaaaaagggtgaatatagcgccaaagataaaaagatcacctggacaatcgatgtaaactacaatttgtttgatattcaggatgcaatcctaaaggatgcttacactggagaccaatctttcgtagacggctcactgaaggttcatgagttagagttacagggagccaataatgttactgctgtaggtagcgaggttccgctcacacctggtcaattccagctgaatccggacggtaaaggttttgtgttggatctgggtaacatgggcaaaatggcttatcgcattcagtaccaaacaagtctggatggaccatattctgtcgtaggcgcttatgccaaccaggctgttctgacggatggtgagggtggtgcaatacgatttaatagatcagccagtgttacacctgccaacggtggtgtatacgtccgcaaaacagggaagcaagaaggtacaacggataaagcatcatggacggtaaatatcaatccaagtcaatctttcattcctgcgggtaatcaattaacagataccttgtcagagaaccagattttattggctgattcattgagattatatgcaaccaatttacctgccaacaattcaggcaatgtatccaccaaagctggacttgttgatccggctgattatgaattggacgtggagggcaatacatttaccttcaccttcaagaaagatattcataccgcattcattttggaatatcagtcttatattaatgccgatcatggcgcccgaattgtgaataaggttgaatttgcaggccaatcttcctcggtaatcggagaaggtaatcagtcgggaatcaaagtttccttggctggagcaggtggaggagcctctacaggtctgggcaaaatcagaattcacaaagtcagtgatacaggagttccgctggagggtgcaatatttgcaatctataatgcgtctggaactacgcttctggaaaccttgaaaccaacggacgagaatggtgtggttgaaagctccagaaactatcgattaaacaatctaaccaacggtgtaccttataagttaaaagaattatctgcaccggcaggatacttggttgatcctgaatatggctctgcctcaggtaaaacgattgaattcaaggatgcggatatctcctttgaaattgaaaataaaaagattcgtcaaggctttgaattaaccaaggtagatgcggtggactcctccaagacacttaagggtgcaactttcgaattgtactccaaggacggagcaacgcgagagaaaatcgatgagttaacgacaggggaagatgggaagatcgccaaaggtggactgttgccaggggattatgaattggtagaagtcgtggcacctgagttttatcaattggatgctacaccaattccgtttacgattgtagagaatcagactcagattattacactgacgaagtcgaatgcaatgggtgcaggcggtaaacttgtcgttaccaaagtaaatgccaaggataagtccgtattaagcggaattgaattcgaattgcgtgatcgttccaacagtgtcatcgatacaaaagtaaccgacctaaatgggatcattgaattcgatggtttggactatggttcgtatacattggtagaaaccaaggcagaaggatttgttattgaacagccggagacccttgtatctattatcaaaccggaaactcaattgaccattgaaaataaaaaaaatgatcgttctgttaaattgattaaaaccaatgcgggtagaactcagcaccttcaaggagctgtgtttgaattacgggctcagactgcattgatggatgcaaatgggaattgggagttccacaaggtaacaggtctagatgaagctacactgacaaccaatcaacaaggtgaaattgtactggaaggcttggatatcaataaatatcagttggttgaaataaaagcacctaacggatacatgttggaaacaacaccagttccatttgaaattacgaacatacaaaccgaagccgtagttgtggaaaaaacgaatcaggccatcccggtatcgggtggtggatctagtggaccttataatccgggaacacctactacgggtgtaacaccagatccggagaaaccagtaacaccaggaccggaaacaccaggaacgtctatcccaggcacagtggttactggacctactgaacctgaaggcggaaccgaaattccaacagatgaagattacggagtaactcctccttcgcctggcgattccaacggtgacgacaatgcacctccagttggggatacagatgcaccggatggggatggtgcacttgcacctcctgctggaacgggtacagatgggtcacagggcaatggaaattctgcatcacagccaaacggaaattcgttatctcagggaatgttgccacaaacaggtgaagagagcacaatggcttacactgctgtgggcatgatgctgatggcgttaggtagcgcgggattcatgtacttccgccgcagacaacagcttcaacgctagatcgaaacacaaagtatctaaaattcatcgtgtgtagatagaaataccctctagcaatcactacgaaggcttagcgtcgacgtgtgaatatgctagagggtattttttgatgatattaaggcaggatcaagtccccgtaatatttggtttcacttcaatagctcttacaattaggcgatgtgttggattgacgagtggatcacaggtaatcaaggtaaggacctgcccaagcccgggatcctccagcacagataagtcatttggctctacaacggatatctgatctaccttatattggataattgttcgatttgccaaggtgacttccattgaatcaccaatctggagttctcccagacgattgaacagccgtccttttttgtgggcgcgatgagcggctatggcagcattacctttattcccgatacgggtggtttcgacaagatgggttgcagctaccttcatattgtcctccgttgcaccctccagaatcggtaagcggacatcaatcttgtcaatcgatagtacccccaacgtatccgaggaggcctcttgtactgtacctgtattgtcagtagtcggctcggcagaagctgcatcctgtatgccttgttcgaaggagtgattaagcttagacaagccgttttgcaattgttccagatcgttcatgacacgggtttgctgccagtcataatacgtttcccgcaggaaaggaaagctgatgatcaggatgcccaatagaacgagcagaatagagaattttttcattatacatcaactcccgttgtccaagaaaaatagtatacctttctctattctacttaccgacctatacaaaatatggacagggacgaaaggacgtacgggaatgttcgaaggggagagtggacccaaaacaaaatatccccgtatcgctacagtaggaaaactgcaacgccacggggaggtttttttatatagagtcggattgaatcagttaatggtggtacacgttggagctactatttatcacttggtgaatcggtaggtgtgaaatcacattcctgcagcggcaccactttggtctttttgatccatttgtaaccaagccacaatatcaggaacaggggtacgctcaagtaggcaacgatggctccactccagtcgatctgatcacccgtgaatgcctgatagttctgtccaatgatcacgatgatacacaggacaaaagcaaagatcggcccaaacgggaaccagcgtgcacggtaaggcagatcgctcagatccctgccttgtgcaacgtatgcacgacggaagcgataatgactgatagcgatacccagccaagtgataaaaccacacatcccggatgcattcaacaaccaggtgtacacaattccatcgccgaacagggaggcaaggaatgccaacataccaacggctgttgtaagcaaaagtgcattcattggaatgccttttttattcagcttgcccaggaaacgaggggctttaccgtcacgggcaagggcatagagaacccgacttgaagcgtacatgcctgagttaccggcagagagtacagaagtcagaataactgcattcatgacggaagcagcaatggcgaggccggctttctcaaacaccagtgtgaacgggctgacaccgatattctccagatcacccttgagcaaatttggatgcgtatacgggatgatcagactgatcacggtaattgccaaaatgtaaaaaatcagaatgcgccaaaatacctgacgaattgcacgagggacattttcgcgcgggttttcactctcaccggcggctaccccgataagctcggtaccttggaatgagaatcccgcagccatgaacacaccaagcacagcgaagaatccgccatggatgggcgcatcaccgatggtgaagttactgaaaccaaccgcttctccgcccataataccaaagatcatgagcacaccaacggccaggaagatgatgacagtagcgactttgataatggcgaaccagtactcggactctccataacctttaacggacaacacgttcaaggcaaagatcagcacgaggaataataagctccataacatggacgaactgtcggggaaccagtatttaatgagtactgtagcggcagcaagctctgctgcaatggttaccgcccagttgtaccagaagttccagcccatggcgaacccgagagcaggatcgacaaaacgtgcggcatacgtattaaatgaaccggagtccggcataaaggtagcaagctcaccaaggctggtcattaggaaataaaccatgatgccaacggctgcataggcaattaatgctccaccagggcctgcggttgagatggcggtaccacttgcgagaaacagcccggtaccaatcgagccaccgagggcgatcatcgtcatatggcgtgcgcgtaatccttttttcagggaaggtccagttgttgttgggttactgcggtcttgcatggaaacactccttcattcgatatactgatgtttgcgatacttgaattcataaacaaaaagaccacaggcatcagcctgcggtctttaatatttcaatgtccgcaccatgtcccagatgattaagatagctcaacacagaagaattcatacctttatataaaggaaatgtacttccgtgacagttctgcgcctttcgacagcagccccagctcaccggaccgtataaggaacgtccagcgagcttcggcgggtacacctttcggctgatctcataagcggctccttagcgcctccatcagcgtactgatcgcacccgcgacctctacctcaccatcaatggatgaggtgtatctattgtctatgaaattatgaacaacacaacttaacaccgtgtgtcctgtttagtaaacagacaatcagtataacgcgcatggttttccagtgcaataacaattgttggatgtgaggtctgagagacgactattcctcttttttgttacgaccagccatttgctgccatactgttccagcggcctgttcgcccgattcgatccgctccagagccatcttggcctgcaggctgacttcaaattcgggatcatcggctgcaactcgcaacgcttgctctgcttcttcagttccgacctcatagaggaaacgtgctgcacgccagcgtacaagtttacttttatcggataacgtggctgtcatagctggggttgcggcagggtccccaatatcagacaaggtatccccggcagtccggcgtaccgcaggagaactgtcctgaagcgcttcatacagtaattccatcgcttccggtgtacgaatgtcacccaggtataccacagccaagcggcgaatctgcattttgttgtcatgcaaggcatgggctacgaggggcagtctttctgccgtaggctccatgccgtcaaatgccgcatagcgaacattccagtcctcgtttcgcagagcctcttcaagttcggctccatccaattcacggcggcgctcgacgaactcttcggatttggtaccatgttcaatggcctgtttgatgacctgctccaatcgttccggcgggtaagcggcttccaattcttgctcgacttcacgtgcaatatcaggcaattcaccatatcgaacaccataatcactcagtttgcgttctttgatcatcgttgcactggcgacttctgttacggctttgacaaaacggtctgacaacgagattcgttcttccttgaccccggctttgaccctaatttgcatcggtacgcctcggaagaattgtacaaatacctgcgcttctccgaagtgctcgcctgaaccatcttcagattctatccagtcgagatcaatgccttgctgtccaaggcgattttggacttcacccaagataacggaccagtcggcattccctttacgatcaagtgcaacaaagtctgttgtgtggaacacactctttacaccgggaatatgaagcatctggcgaatgaacgccggagcagatcgttcgttgtccagtgtatatgttttgcgaattccgtcctccagacgttcatcgagatgtaacatcatcgtatttggactcggtgttggttcaatggaaacaatattcatcaatgtaacctcctatagtaccagattcatctataacttcccgtaaattaaatcacacgggtatttctctattttacatcaatgtgaggaatctgcgaaatcattcagaagtgaaggggacctttctaacacttaatgtgaagaagtacgaaatttgttaacacttctttcatgttcacgcacaaacatttttaaacgaaaattggcacaataaagataagaatcaactggaggttatacctatggaacccattaccgtgctctcggatggaaaacgtcgtattgcatatgagaatattattcaagtgttcaggaactggtttgaggactcagcatctggttctgcgatagaaacacatcgtggaagttgggaaaatgcccgttactgtattgttgattatcaggttgccgaagaagcggtgtcagcggcaaatgccattcgggcttttatgccacaacttccgttactggtcattacggatttcaaatcccttattcggaagcgtcatcttcaacagattacaggtacaggtgagatgaagatgattctctggaatgagcaagagccgaatcaactcatcaaggatatggaaaattggtttcattcttcgtctatccataaatcagaaatagccataccacccatcttatccatgagataaaagagagatatggccaaagatgtttaacttcttaatcgttaagatcgtattagatcacatatttatagcctgttccccaaaccgtcttaatataacgtgggttcttggggtcaggctctatttttttacgcagacttgagatatgaacatcaatggtacgatccagataggcgcgttcagagcctttgatccgatccatcagctcattgcgggtgaacactttacccggatttcggtacaattccttcataatctcaaactcaatatgagtgacctcgatctcaacgccatccacaaacagggttcttctgtactcattcacattcacatgtccagtaacctctgcctgcttatcttcttttaccggtttatccttataggaaatgattgatcttcgcagcagtgctttaatccgggcatccaactctttcaaactaaatggtttgcacagaaagtcatccgcaccattatgcaatgcgcgaagtcgatcattcagcatggtgcttgccgagatcatcagaatgggcacagtggagtgctggcgaaaggcttctacgagatcatttccatccatttcaggaagcatgagatccgttacaacaatatccggctggaattgtggaaacagttgaagtgcctcgcgggcatgatgaacccgttcagtgatgtatccttcctcctcaagaaagaaagcaatcatgtcggccagatttttctcatcttctataagaagtactttgatagtcatagggtcacactcctggtgaaaataatatgttaagaaaatgctaaaaaaacaaggtgaattgcgaataaatgccgcaaattttttaatgtttctatcccaaaatataggatgtatatgtagagaaagaataagctttttgaatgaacttcaatattctagcatgaatgcagtttggttgccgatcaatcagaatttcccaaagctacaccaagtattaattacagtataatggatcagaacgagttaaggggaaaaaaagtaatattgtatccgcttaagtttatagggggaaccaacgttgttgttgaaaacagaagaaaaaatgatccatgagggcaattgcttatggatcttataaaggcaaaacggctgctggagtgggtcgtgctgaagctaaggataccctggtttggaaccagcatactgatcattcttggctcactaagtactatttttccacttaccttattctatggcgtgcagtttatggttggcagcgcagcagcactcatcgctcttcgtttgcatgggactatctatggatttgtcaccattacattcatctatctgttaaataccaccgttgtcggcttcgagccgcggaacttaacggtaatgattgcgcatttcattgagctgatctggatgatcggttggcaattgcgttggaagaatggcagcctaatcaaggctaatgctgtcttttgggtagtgatgctgcttcccgtcatctattgcggacattatttattgggactgaatatagaagatttgaagtatgagtatatgtatattgccgtgattggtatggtgaatgcgttgatcgcgggtattgtggtggacttctggattactacgggtgagcacaaatcaaaacgtacaggaactattcctatcaccagaatcgcatttaaatacgtagtcgcctttgtggtgtttgtttctctcctattgttatccgcagatagccgcagacaattaagtcaaatgaatgatgccattatacttgatatgaaacatgcagcaagtgctgttgttcaggatctggacgaacagtatgttacctcggagaatatggatcagaacatggcacggtatcatcatttattgggtgtgaatgtgattctgctgaatcggaatgatacagtcgttacttctggtttgaatacactacaggctggtgagtatctggacatggatagatacagtctccttaagtcgaaagataaccttatgctattaagctctgagaatattcattacagtgctgtattgaatcactggaaacaggcatctttcatctatgaagcggagatgacagctgtaacaccttatcgggtattcattgagaccagctcaaccaagtattatcctcgaatagaatcgatctatcttaccacattgcaatacctgttcctcatcatcgtggcttccatgattgtagcggctcctctgagcagtaaggtcgttagtccactcttaagactaaccagaatgacaggttctcttccgaggttgctgtttcgaaatgggaagatggagtggccaacgagccatgtaactgaagtacagattctgattggtaatttgcgtaaaatggctgatgtactgctggaacaattcgaacagattcgtcacgataagttaactctggaggacagggtcatagagcggaccaaggaactcaagaatagtgaagaagtcaaacgtgccattattgaatcgtcgatagatgcgattatcgctgtggactccagtgggctgatcgttgagtttaatccggaggcggaaagaatgtttggattgcgtcgggaagaagtgattctacacaaggaagcgccgactctttttcaaggggccagctgcaaggagatcaagagtttgctggagcgatttgaatatgttgaaggtaaaagatacaccatcgttgaagaaatttcaggtatccgacgggatggttccgtatttccgattgagtacaaaattgttgagatccagttgggcaaaaatgagacattatataacttgtttattaaggatattacggagcggaccagagcagaagaagatcgtgtacgtcatgcccttgcgctggagaagctgaacttggagttgttcaatgagaagattgccattcaggaacagcgagatatcagtgagcaatttattgaatccgtacgggaagggctcgtgatgtctgatcgatcagggaccataaccatcgtcaaccgaaggatagaagagatgtttggtttgggtgattttatgggcagatccattgaagatttggcgcaggcgattgatacgatggtattaacggacaacttcaatctgatggaacagacaagagcattcctgaatggagaaacggcgtttatcgagactgaatttatattcaataatgtggataaaagtgtattttccttgtacatgaagcagatggatgtcccgggtaaaaaccatgggtttctgctggtgttccgtgaccgaacaggagaagaacggctggatcggatgaaaaatgagctcatcagtgtggtatctcatgagcttcggacgcctgtagccaccattatgggatatgtggaactcatgatgatgtatgaccttccggcagctcaacagcgggaattcatgcaaaccatctcttcggagggcaagcggctgagcagtttgctcgatgatgtactcgatattcagcgcctcgacaacgaaggtatgacttaccacatgacatatgtaccgctggttgagttggtagaaggggttgccgaacagtggaatatgaagtctgcccaacggatctacgtgcatacgtttaatggagacttctttgcttatgctgaccagaacaggatggttcaggttctgcataatctggtgggcaatgcagtcaagtattctccgggagccgatcgtattgatgttacgttatgggaagaagaggaatggttatgtcttgatgtgcgtgactacggaataggtattgcggagcaagagaaggacatgctgttcaacaaattctatcgggttgataattcggatcatcggcagattggtggaacaggaatcgggttgtacatttcccgtaaaattgtagaggatcacaagggtacgctgacttttatatctgcaccggacaaaggaagtacgttcaaggttcgactgcccaaacaggacgtattggtgtgaatttaatgaaggatgaagaaatgtatttcacttttttatgaataatgtttatgtacgagaactacggatagagcctttacccttcaacgcgtgagcgtgataaggggaaaggctttttttgtttttcaatttccccggataaaaaaacaacttcttttgcaaactgtctatagagccataatttgcatcccatgcaaaaggaggacggcaggtatatgttccgtaaacaagagaaaacactcattatcgtctgtctggttgcagctgtggttgtgctgtatgccgttgtgaagagcatcatccgaatcatgagttattgagatacatgttcaagcagagtaattgctgccgtacataacgattatgtgaaagaggagtgtaaccatgtcatccctggatcctgttctgctcagccggatactaaccggccttaccctgtttgtacacattatttttgcctctatcggtgtaggtgttccacttatgattgccttggccgagtggcgaggactccgaaccaatgatatgcattacaccttgctggcacgccggtgggcacgaggttttgtcatcaccgttgccgtgggcgttgttacaggcacctcgatcggattacagctcagtctgctgtggccgatgtttatgcgggtagcggggcaggcaatcgccctgccgctgttcatggagacgtttgccttttttatagaggcgatctttctaggaatttacctctatacgtgggatcgtttcaaaaagaaatatacgcatatgctgctgttgattccggtagctctcggctcatctgcatctgcgattttcattacaacggtgaattccttcatgaaccagcctcagggatttaccctgattaatggcatcatgaaagacattcatccgattgctgccatgttgaatccggcaacgccaaccaaagtgtcccatgtactcgcctcatcctacaccttgagtgcaggtattctggcggggatagccgccttcagtttgcttcggggacgggatcatgtgtattacaaaaaagcactgaaactcacgacggtatctgcgctcgtatttgccatcagtaccgtcatgatcggcgattcctccggtaaattcctcgcgaaatatcagccggagaagttggctgccgcagaatggcatttcaagacgatgaaagaggcaccgctcgtctacggggggattttggatgagaacaatgaagtgaaatatgcgattgagataccgtatgcccttagcattttggcgggtaatcgaccagatacggaagtgaagggtctcgaagaatttccggcggatctgagaccaccgttgtctattcactatatgttcgacctgaaggtcacaacgggagtgattatactgatgattcctgtgttatatgtactgcggcggtggttgccagggcgcaagccctatcccaaatggctgctgcttggcatcgtcttgctggggcctctggccatgattgcgatcgagttggggtggatgttcgctgaagttggcaggcagccttggatcttacgcggatatatgaaggtggcggaagcagccacgacgtcaacttcggtaggatggatgttagtgttgttcatcttgctgtatctgatcctgtgtttctcgtgcattcgggtactcagcaagctgttccgtaacaaggaagcagagaaggaactagagtctctggggcttgaaggagggatcgtgcattgagtttcgaaattgcaggcatcgcaatattatggacgtttttgttcggttacctgatcgttgcttcgattgattttggcgccgggttcttcagcttttatagcattttgaccgggcatgagaacaaaattcataacatcattcagcgctacctgtctcccgtgtgggaagtgacgaatgtgtttttgatcttttttgtggtcggactggtcgggttttatccggatagcgccttttattacgggactgctttgctggttccgggttccctggccattgtactgcttgcgatccggggcgtgtattacgcctacaatacctatggcaatcatgggcagaacagccggatctatatggcattgtacggggcgacgggattgctgattccagccgtgttctccaccattttggcaatatccgaaggcgggatcattgaagaggtgggcgatcaggtattttttcgctggcgtgaatttttgacgaatccctatacatggtcggttgttttgcttgcactggttagtgtgctctacatctcggcgatgtttctatcctattatgcaaaacgggcgggggatgagccggcatatgaggtgcttcgagagtacgcgctgctctggagtttgcctaccatttttgcaagctttctggcttttctgcagattaacaaacagaatcccgcacactttgagcagatggtgaatatttcgtggatgttcatcgcttcgtttatttgttttgtcattgccgtgtcgctggtgtggaaaagtaaatatctaggttggtgttttgttgctgtcatgcttcagtttgcctttgcctggtatggttacgggcgatcccaccttccgtacattctgtatccttacatcaatatttacgacggctttacgaatcgcacgatggggattgcgctcattacagcgtttagtctggggttactcgtgctcattccttcgcttgtgctgattatgaagctgttcctgtttgatgccaattatgtgcgcggtaattctggtaaaaagaaaggatgagtctgttcatggtcactactgagggagtcacgggaatacccggtataaccggattgagcttttttgagacattcaccattatgtacgcccctccactgatcattgcggctgctattgtctttctgtttatatatctggccgtatataagaacccaaaggattgattggttggtacgtccattcccgtttggggtaatctgttgttaagaaatgaggaagggaggagggccctttcatgccaaaaatccgttataacaatatcgataatgtaagtacggacaaaacgctgaaggaattcaaacaatggagggagcaacggcggagcaaagtgaaggactactcctacaccgtgcccaaacacccgcctgaactggattatctgcatgccaaccgggatgacacaagtattacctggattggtcactccacgtttttcattcaatattatggattgaacatcgtgactgacccggtgtgggccgaaaaaatgggatttcaacgaaggctcggtgcccccggcattccgattcaggatattccaccgttggatgtgattctgatatcccattcccactatgatcatctgcatctggcttccttgcgtaagctgattacagccaagacgttgctgatcgtacccgatggtctcaagcgcaagatgattcgcaaaggattccatcgatgccaggagatgaaatggtgggatcatatgacacttggcggagtcaaaataacttttgttcctgcacagcactggacgcgccgaacgttgtttgacaccaatacgtcccattggggcggttatgtattggaatcgaatcattcggcaacgacttcagcagcggaaagtgttgcaacaacgagcaatcaggatgagtcatccacggaatcagggaagaacgatacatccggcggcccgcctgtgttgtattttgtgggtgatacaggttacttccagggtttcaaaacgattggagaacgctttgacattggtgttaccctgatgcccatcggtgcctacgatccggaatggttcatgacttctcagcatgtgacacccgaagaagcgctgcaggggttcgttgaatccggctcacagctcatggtgccaatgcattacggcacattcaagctggcggatgatacgcccaaggaagcgctggatcggctggaagttgaacgtgaacgtttaggcattggtaaagagcggattcgggtgcttggtcatggcgaaacactccgcattcaccacgaggaaggtaaacagggctaacaaaagtgagccaaatatgttaatgtaggggtatgcctgcatgaacagtacatttaccaaatctttaataagtaaaaagcggccaattttcgaatttgccgcttttttgtgttataatatggtgccagaataggcatcgggatattgaatccatgatttacgcaacttgctattcatgcagtatgcagattaaccaataaaggatggtatgcttaatgatcagtacaagcggcatcacgctccgctacggaaaacgtgcactttttgaagatgtaaatatcaaattcacgccagggaactgttacggcctgatcggcgccaacggagccggcaaatcaacattcttgaaaattttgtctggtgagattgaagccaactcgggagaggtgcacatcaccccgggcgaacgtatggccgttttgaagcaaaaccactttgaatatgatgagtatccggttctcgaaacggtaattatgggtcatagtcgtctgtattccatcatgaaagagaaggatgctttgtatgcgaaggcagacttcacagaagaagacggtttgcgtgcaggtgagcttgaaggggaattcgctgagcaaaacggctgggatgctgaaccagatgcagcggcgctcctgatcggtcttggcattgttcgtgacatgcatgacaaaaaaatgatagagctgagcggaaacgaaaaagtccgtgtattgctggcacaagcgttgtttggccgtccaaacaacctgttgctcgatgagcctaccaaccacttggatctcgaatccattcaatggctggagaacttcctgatggattatgaaggtaccgttattgtggtatcccatgaccgtcacttcctgaacaaggtatgtacgcatatcgcagatattgacttcggtaaaatccagatgtacgtaggtaactatgacttctggtatgagtccagccaattggcacttgctctgcagcgggatgccaacaagaaaaaagaagagaagattaaagagctacaagcctttattcaacgtttctctgcgaacgcttcgaagtccaaacaggcgacttcccggaagaaaacactcgacaaaatcacattggatgaccttcgtccatccaaccgtaaatacccgttcatcaacttcaagcctgaacgtgaagcaggtaaacaattgctgacggtagatcgtattgacaaatccatcgatggtgtgaaaatgttgaatgatgtgagctttgtggtgaacaaaggtgacaaaattgcatttgttggcccgaacggaaatgccaaatcactgttatttgatattctcatgggtgaaaccgaagcagatagcggcgaatatacttggggtataacgacgactcaggcttatttcccgaaagacaactctcagtattttgacggtgtagacatgactctcgtggattggctccgtcagtattcgaaagatcaggatgaaacgtatctgcgtggattcttgggccgtatgctgttctccggtgaggagtcccagaagaaggctagcgtactctccgggggggagaaggttcgttgtatgctggcaaaaatgatgcagacaggtgcaaacgcactgattctggatgagccaacgaaccacttggatcttgaatccatcacagcactgaataacggtatgattgactttgacggcacaatgctgtttacatcccatgaccatcagttcatccaaacgattgctaaccggattatcgaaattacgccaacaggcatcatcgatcgccaaatgagctatgacgaatatctggaaagtgatgaaatcaaagaactgcgcaataaaatgtatccggtagaagcttaatctaagcatcatctgcggcacatgattataggaacaccaaagaaccgcaagcctctgtgaagagggcttgcggttctttttgtaattcaatggtttctcggcggctttaagacctaagatccaccagtacggcgacgttggttgttaggctttttgttgttttgactcttcatcgctttaggtccgccttcaaagtaggcgctggattggttaccagaatttgcttgttctttcttttgcgccagtttttggcgtatagcatcctgcaaactgacctttttcggttcgttattttcgctcatcgttatttccctcccggtcttacagtgagccgtccagattggacgggatgtacctattttatacgttttataaaagccccacaagggcaacctgataaaatgctcaaaacctttggttttacccaggccaacattttttctcaataactacagccctgccgtctggcaactttgtttcggcttgcctacagcaatgcaacctggcaacactgtttctgtagacccacacgctccgcatttggtaacatggaaaaaccgtaatacgaaacgttaaaggggtgtcgcccggtttgaacgcttatgaagaaattcgaaaaggggagcgaggggcttgggttagtatcgtagcctatctcgtcttgtccgcttttaagctgatctgtggatatttatttgcttccagcgccttgctggccgatggttttaataaccttacagatattgtagcatccattgctgtactgattgggcttcggatctcccagaaaccacctgattcggatcatgcctatggtcattttagagcggagacggttgctgctttggtagcttcatttattatggctatggttgggctgcaagtattggttgaagccgttcgctcctggtatgaaggagcctttgttgctccaaacctgtgggcggcagcggtggctgtagtctgtgctgtggtgatgctaggcgtgtaccgttacaatcaccgtctggcaaaacaaattaatagtcaggctctgatggctgcggcgaaagataatcgttccgatgcctgggtcagcataggcgctgcaattggaattataggtgcgcagtttggacttccatggctggataaagtagctgccattgctgtaggtctgttgatctgcaaaacggcttgggagatttttcgggattctacacatcgtcttaccgacggatttgaccagaaggaactgacggatctcagatcctccgtagcacgcgttcccggtgttgagatgatcaaggacgtgaaggcacgtgtgcacggcagtcatgtacttgtggatgtagtcattgaagtggacggaggcctaagcttgattgaaggccatcagatctgtgaccgtgttgaagagcggttgaagcgatcgcataacatcatgcatgtacatgtacatgtggaaccaaagacggaagaagtcacaaggaacccttgaacagggagtgaacatcttggaaaatgaaaagaggacagccgcgattgtgcgtgctgtcctctttacttatcgttagaacgattatacgatgttattgaatggcaacgtggatccacgctttgcctttccaagtgtatacttgtacccactcgccgccatcgaatccatcaaccacttcacctgttgtatcgatgacttgggagcctaatgcaccgattggtttaccgttaggtgcatcatagaaccaagtgcgctccagaaggttcagcaacatcgttggtgccagtacttcatcacctggttttacgagtggctcttcaaataacttatctgttgtaggagaagggttattaccattagtgctgtaggtagcaccggttactgtctcagtagtaccttctactgtttctacagcaggtttgttcacttcaacagccggagttgttgtcgttgttgtagcctcaattcctgtttccggagttaccgttccagtaaccgcttcctccgcacccgcagcggcagccatcgaacccatcaatgttaaagcagcggcaaaacttacgatttttttcattttgtttttcctcctcggtaggtatgtaaaatgttgtcctgattacaagtaaccaagcaagcacccttatgaatcacaaattataacaatattttcttgcattctccagtgtcaactggctcatatgtgggtatatagcaagcctgtaaatatcatacttcagtgggataaaaccgggttggctatctcaaaaaggtcctgttttttttgggattcatacgagagcggattggaataaagcagaagggagtgcaatacataatatagaaaagttgacctatgcctgaacgcacaaaagccaatcggctcgggagcacgatcggcttttgtatgtaatcgtttagtaaacactcagacatatcagagcctgaggttatcgcattcggctacgtcccgtaatcagggagattacgaacagtacaacaaagatgaagaagagtactttcgcgattgaagcagctgcttcaacaataccgaagaatccaaaaatacctgctaccagtgcaataattagaaataatacagaccatttcaacataagtattcatcctttcgtataattgtttgtggagtgagttgtgttcacctcaccgccttgtgtagtctaactttaaccgagtgctaaccgcttgaaacattggttttttttccaagcgaaggcatatatgaagggatatataatattgtttcgtccgggaaatcgccgggtaactatagcaataacaaactgatgcacatatggaaagagaggttcttctatgatctatcaaattagcgtggccctgattgcagtggcatttgcagtactggtattctttttaattcgtaccttgaaatccgctcagggttctttggacaatgtctcacagacattgcaggaggtacagaaaaccattgatgaacttagttatgaagtgaagcagacggtaagacatgccaatgatattacggtggatgtacaacacaaaatgaaaaaaattgatcctgttatggaatctgttgagaatctgggagaagtgttgaatgaagtgacggcagcagccaagcaagtctccacaacgctgatggcgaaatttcagaccaaacgtaacaacgctgaacagaccaagcatgctgaagcggttcatgtaactgcaccgcctgctacatcaacggatcgtaccctgcaatcctatgaagctacatataatggtgaagctaagggcgggaaaaactggatgaagtatgttgatgttgcagcgaacgtatggcaacggatgcgcaagtaacatgaccgctttgtaacccatgaagaagccttcagagcggtgatgaacctgatgaaagggtgagaatcatgatgaaactactgcttgtgatgtttagcgtaatttctcccttttccgttcaaccggcagcggtacccgctgctcacgatatgcaatggacggcaatggaagagaaggcgtcagaggtaactctggctgttgatcgatccgagactttccagcattttcggactctgaatggcatttctctggatgacaccatggatgatttgttggccaataagggccagccggggcataagcaggaagatccttatctgggatgtcctgaatatcactttcatgatgtgaaggttggcttgtgtgaagatacggatgtcattcaatatgtgcatatcgatgcatctgagaatcacatcatgttaaacggaaagagaattgagatgaatattgaagcgatccatcatgctctagggaaaccttattatgtggcagaggacggagaagtgtttctccgtggggaccaggctctgaaggtatatatgaagtcaggatctcatcagattgaaggcattgatctttttgatgacacagtttcctaggattggttattaccaaatcgtttcaaacccatatagtatggttatatactaagtagctcgatacagaagattaaatcagaggagagtggaaacgatgaattcaaccaatgagcaagcttatgcaaaagtggtagaaaacggagtccaagcggtagaagcggtgaaagaattgcagattaccggataccttgctgatcaaatctttgttctcgcccatgagaaggatcgtacagatcgaattgccgatacagcagatgccaaagaaattggcataaaggaagaaggcgtatttgattccttggcgaatctgttccgctcacgtggtgatgaactccgggccaaaattgtttcgatgggctttaccgaagccgaagcggatttctacgagagtgagctcgacaaaggtaaagtactcgttattgctaaaaagaaagattaaccgataagttgaagtttgctgaacatggacaagcttctgaatcatttatgtaaaatgcttaatcaaaaacatagataaggaatggggctttccccattccttatctatgtttttgcaagtttggaagcgggatcaggacgctgcaaaaacagggtaggtcgcggggatattcccctacgatggtgccatttactgatagaagttttttgtttttacgattatagttatactaggaattattatgtctactgccgttttgtatgcaaaatttgtataatcaacgtttgttttaacctaataagaatcgacaaacccggacgccacagataaggagatatcaatgagaatacttattgttgacgacaatccgacgaatgtcattatcattcgagaaattctgaaaaaagaaaactatcgtgacattgtaacggcgagttccgccatggaaatgtttgaagtgttaggaattggggaggaaagcaacgaacttcgtccaagaccgtcggatattgacctgattttgctagatatgatgatgcctgagatggacggtatcgaagcctgcagtattgtgcagaaatttgagaatctgaaggatataccgattattatggtgactgccatcggagactccaagaaacttgccgaagcattggatgctggtgcatctgattatgtgaccaagccgattaataaagtcgaactgatggccagaattcgactcgcacttcgtttgaaacaggagaaggattggcataaagagcgtgatcaacgtattcaggatgagctcaagttggcagcgatggtccaaaatgctgtattaagtccggcaattagggacccgttgttccaagtgcatgccatctataaaccatcctttgagcttgcgggtgatctgtattcttggtacccccttggggaaggccgttacggagtactgctgctcgacatgatgggacacgggatatcttcatccctgtttaccatgtttatcgcttctgtgttgaaagatacggttaccacttatgtggatccagagaaggtcattcaagagttgaaccgtcgttttaaccagctccatctggaaaaacaattggtgcagtattatttcacggcaatttatctggtcgttgatacacggatgaaacgtattgattatgttaatgcagggcatccacctgctttatttttccgaaacgacggcagtgtcaccacatttgacagcgtctgctgtcctgttggtttatttgacaagatggatattgaaccacaaacgatccattatgagggtgacgggcatattgcactctatacggatggattattggaagctgttcagggcgggcaggaagaacaacatgaattcctgatcgaaaaactgaccggctcacatcagtggaatgaagctgctatgcaggccatgttttttgacgacgaaattccccaagagcgggatgatgataaatgtctggtctggattactttgaataaaggggcggtggatgaatgaagatcaggaataaactgctgattggttttaccgctctgatggccattttgatcgtgctcacgtttgtgagttatgaacggttaaacagcagtaatcaacagattgatcagatgtatcaggaacgttatctcaaagtaaggttcacttctgctgcacgtggagaggtcaatgatatagccaaagtgctggctaacttgttattgaatccgaacaattcgattaatgctgctgagggtgacctgaaggagatgaaggatcggggggatggttacctcgcagaagtgagaaaccgggcagacagtgcacctgaacatcaactggtggatcgtgtgaatacggcgtggaccgcttatacatcttatgcaacgagacagatcaacctgatgtcccaaaaccgggtagaagatgcgaataactaccgcaattcaacaggactcgcggtgcaaaaagaaactgtggatagtttgaatgctctttcacgttatcaggaccaagagattgatgctgagatcaagaacgctaacgaagcgtatacgagagcagtacagatcacgataagtatcatgattgccgggttgttgcttgcattgggtgtcattctttgggtgctgccgagtattacacggggtctgaacactgtatctatgatgattaccagctttggtaaagggcgttaccgaaccattcggcgcatacaggtcaaatcaaccgatgagattggtcagattgccagtgtgttcaaagatgtatccagtgatctggaagaaaaactggagatcgagagggcttatgtgcaggctcagcaggatcaaaactggatgagttcgaacatcgcaagagtcccggagctgcttcgggggattggctccattcgccaaatttcacagatgtttatcagtgagttcacacctgtgcttggtgctcagttgggtgtcgtctatctgatcgatgaggagaaacatcccgacgaactgagacgttacggtgcatacgcatttgaagagaacgaagatgttggtaaggaaatgtatcgcatcggggaaggcctgattggtcaagccgcgctggatatgacaccgattattctggaaaatacgcccgaagattacgtgcatattggttcagcttcaggctcaacacgtgctgcgggtatcatgatctatcctgtcgtgtttgaagatgaactgattggtgtagttgaagtggcttcctttgaaggtttcaatgaactgcacaagcagttattcacacaactgattatgaacctgggcgtaattttgaacaacgttcgacgtcgtttgcgtgtggaggagctgctgcgtgaatcccaggcactgactgaggaacttcaggttcaatcggaagaattgcagacacagcaagaagaacttcgtcgttccaatgagaatttggaggagcagacagaggcacttaaacgttccgaggaattgctacagcgtcagcaggaagaactggaacattttaatacggaactcattgccaagacgcgggcgcttgaagagcaggtgcgtgaagttgaagagaaaaatgacgaaattgagaaaacgaagacacagttggaacagcaagctacacagctgtcgatgacaagcaagtacaagtccgaatttttagcgaatatgtcacatgaactccgtacaccattgaacagtctgctcattttgtcccagttattgtcggagaacaaaggtggaaatctgactgacaaacagcaggaatatgcgcaaaccatctacatgtcgggagcggatctgctgaagatgattgatgagattctggatctgtccaaggtggacgcaggtaagatggatatcaattatgagaccgtacgaatggaagagctgaccagctttgttcagcagaactttggaccgatggcgaataaaaaggaactgaacttaaatatcgatttcgacagcgatctaccggaatgggtgtacaccgacagtcatcgcgtcaaacagattttacggaatttgttgtcgaacgcatttaagttcaccaatcgaggttcggttagtctgattgggagacggatgaaaccggaagagctgccgggttatatgaataccaatcaggaatatctcggattcagtgtaaaagacaccggcattggcattccatcggacaagacggatcttatctttgaagcgttccagcaagtagacgggaccacaagtcggaaatacggtggaactggtctgggattgtccattagcagggaattggcacgtttgcttggtggcgcaatacaggtggaatcatccgaaggggaaggtagctgctttactttatacctcccggataatcatgaagaggaagccttggtagaggaaggtgcttcaagagaagcagctgtatcctcagaggatctttatgaacagtccatcgaaacacggaccatgctttcaagtcatcagtccattctctctcctgatccggagcgtagcgtgggtacagatctgtctccttcccatactccagatgtcacgcagatcgaagatgatcgggagaatatcatggaaggtgacaaaatcctgctcatcattgaggatgacgtaaactttgcacatattttgatggatatggcgaggggaagaggattcaaagcacttgttgcccttcaaggtgataaaggacttgaaatggcacgtcaatatttgccggatgccattatcctggatattcaattgccggtgatggatggttggaccattctgggcgagctgaagagcagttcggcaacacgccacattccggttcatgtgatttcagtcattgatgatatgaagcaaggtctgatgatgggtgccattgcgtatctgaaaaaaccttcgagcaaggattcactggataaagcattctcgcatatcaaatcatatactgagaatcaattgaaacgactgttgatcgtcgaagatgacgaaattcagcgtaaagccattattgaattgattggtcatgatgatgttgcaatcactgctgtgtcgacaggtagtgaggcgttaaatgaattacacagccagcgttatgactgcatggtactggatctgatgttaacggatatgaccggttttgagttgctcgaccagattcgtgatgatgaatatctgaacgatctgccgattataatttatacaggcaaagaactggattccaaggaagaaatgaagctgcgcaaatatgcggaatccatcattatcaaggatgtgaagtcaccggaacgtctgctggatgagacgactttgttcctgcatcgggtagaagccaatttgccggaagacaagcgtcgaatcttacagaaactacacaacaaagaaacgttgtttgagggcaagaaaatattgcttgtagatgacgatattcgtaacgtatttgccctttcaagtgttcttgaaggctatcggatggatgtgacgtttgctgagaacggccgagaggctttggagattttggacaaaaatccggaatttgatctggtactgatggatatgatgatgccagagatggacggttatgaagcgatgacacgaatcagacagatcccgcagtttgaaaagttgccgattattgcgcttacggccaaagccatgaaagaggatcgcggcaaatgtattgaggccggagcatctgattatgtgaaaaaaccgattcagacagatcaattgttatccttaatgcgtgtatggctgtattcgtaagttcattattcgtatgttcattgtttgggtaatgaaagacaatacgacgaatacgcaagtaacaaatgaagaagtggagagaacttatgacaccgtgggaacctaccgagacgggggcagatttggtccgtatgccgcaagatgaagaacgcgagctgatcgagattgagttgctgttggaaggcatgcaccgtttatatggatatgattttagaaactatgcactgccatccctgaaacgaagaatctggcatcatgcacatgctgagggtgttaagagcatatccggcttgcaggagcgtgttcttcatgaccgttccgcgtttgaacgttttgtacagaacttatccatccctgtaacggaaatgtttcgagatccttcgcttttccgaatgtttcgggaacagattattcctatcctgagaacctacccgtatatccgaatatggcatgcgggatgctctacgggagaggaagtttattccatggccatcatgttgcatgaggaaggactgtatgacaaggcaagaatctacgcaacggatatgaatgatcgctctttgcaacaggccaaagaaggcgtatatggtattgagaaaatgaaactatttactacaaattatttggaggcagggggtaccagagccttctccgagtactatacagcgaaatacaattcggtgatatttcatcctttcctaaggaagaacatcattttcgccgagcacaacttggcaacagaccggtcatttaacgagtttaatgttatcttttgccgtaatgtcatgatttattttaatgatgaactgcggaaccatgtgcatgggctgtttcatgagagcttgagccactttggtattctggttctggggtcgaaagaatcgatacattttacagagttcagtgatacctatgagccgttagaccggaccgaaaaaatataccggaagatcaaatagggggttagggttagccatggggctcaatgaaccaatccacatattattggtagatgaccgccctgagaacttgcttgctcttgaagcagttctggaatcggaacaatataaactcgttaaggcaacttccggagaagaggcactccgctgtctgctaaaagacgaatttgcggttatcgttctcgatgtgcagatgcctggaatggacggaattgagacagcgaagttaattaaggcacgggacaagtccaaggatgtgccgattatattcatctctgccaatagcagagaagcggagcacttgtttgccgggtattcagccggggccattgattacatggttaagccatttattcctcagattttgaaatccaaaatcgagggctttgtggagatgtttatcaccaataaacgtttgaagacacagaccatgcttcttcaccagaagacacaggaactggagaagatgaaccaacaactcattcaggccaaagaagaagcagaaattgcagcgaatgcaaagaccgagttcctggcaatgatgagtcatgagattcgtacaccgatgaacggagttatcggtatggttgatctgctgatggagacggaactgagggaagatcagaaggaatatgcagacatcgttcgtcgcagtgcagatgcactcgttacggtcatcaacgacattcttgattttaccaagatggaatccggcaaaatggaactggaagagcatccttttgaacttgtctcctgtattcgggaagtgttgggattgtttgctgcagaagcaggcaaaaagaatctggaactggattatttcctggaagattctgtccctgaattaatctatggagatatggcaaggctacgtcaggttctcttgaatcttattgccaatgcaatcaaatttactgaccagggtggcgtatatttgattgtgtcagtgaatgaagaaaaagacggacaaatggcattggagtttgctgttaaagacaccgggataggtatcgcttcagacaaagtggatcgcctgttccagccgttttcccagctggatacatccatgacacgtaaatacggtggaactggcttaggactggcaatatgcaagactctggttgaaatgatgggtggacagatctacctggatacaacagagcaacggggagcgacgtttgtatttacaattcaggcgaaacgttatgtagaaactgaactggtccagaggaacggggaagagaaaccaacggatgtgaaaaatgagaataaatatcctacggtattaatcgtggatgatcatccgatcaaccagaagttgatggcgattatgctcggtaagctggggttgctctcagacattgctgaagatgggcagagcgcactcgatatggtaaacagcagccgttatccctatgactatgtgtttatggatctgcagatgcctgtgatggacggtttggaatgtacacggcggattcgagagagtctgtcccagtctaatcagccaatcattatagccatgactgctaacgtgatggaaggtattcagcagcgctgtattgctgccggcatggatgattatattagtaaaccggtgaaaatgggcaatgtaaaacagaaaatagcccagtttcagaaacaacgacaaatgttagacccaggcccttcagccatgaatcaggccaattgaaacattttccaaacttctttctgattcactcgtgctgaagttgggttattaggtaaggaaaccattgatcaggagagagatgtctaatgaatacaaataaaaatgaaaaattcaatgcaagaactgaaactcaggacggcgtgtgcacggtgtatctgactggcgaactggatttgtcggttgctcctgacttccgcttggtgatggagccgctcgtggataacaaggaacaggatcttgtgattaacatgaaagaattgaagtatatcgatagtacagggattggtatcctgttatctgttctgaaggccagacatggaatggaagctcgctttgaagtacaggaagttcctgcgcagattcagaaactttttgacatgacgggcatcgccaaattctttgtcacacagaagaattcccaataggaaaggatcgaaaaaggaatgaatgcagaagttcaaagagtcacccttaatttacctgcgacagctgattacgttgatattgtaagactcaatctctatggagtagcatccaaaatgggattttcctacgaagacattgaggatatgaaagttgctgtatccgaggcctgtaacaactctgtattgtatgcctactcacacgaaggcggcatggttgaagttgtattcgaagtggatggcgaaacattgtccattattgtcaaggacgaaggtgccagcttcgagaacatgaaccctgctgtgtcacgtgccggtctacacgacaaagaactgacggaagcacagattggcggacttgggttctacctgatgcaagccttgatggatgatgtcagtgtggaaagtgagacgggcaaaggtacgaaagtagtactcgtaaaacgtcttgcaagaagtgaggagaaagtatgaatgaaaaagtgactcccccagagtccatgtctgaagctataggtttgatctgggaataccagcagaccctagataatgaaattgcaacagttctcatccgtaaatatgaaccaatggtcaagatggcagcaggtaaaatcgctcggaatcgccccgatctatacgaagacttgtatcagaccgggcagatggctttgattcgtttgcttaagcaatacgatatcaacctgggtattccgtttgaaccttatgccatgaagagcatgatcggtcatatgaagaactacttgcgtgataaatcctggtatattcaggtgccccggaggattaaggaaaagggagccctcgtgcaacatgccattgatgagttaaccgttaagctggagcgctcacccggtgtgaacgaaattgctgaataccttgatctgactgcagaagagacaattgaagttctggctggtcgggaatgttaccactatgtatcactggattctcctttatctcaggatgacagtgcagcaacattgggagaactgatcagtgcagatgtgaatgactatgattcggtcgaaaaacggatggacttgcaacaggcattgggacaattgaaggaacaagaacagcaggtacttattctagcattccaggatggccaatctcagcgggcaattgcccagaagcttggtgtttcacagatgagtgtatctcggattcagaagcgagctacagagaaattgaaacagatcatgtctaatgcttcaatgttatgacaaatggaaccctaatgttgttgagtacggcataaagaaggacacgtcaatgcgctgaaatgcatacgtgtcctttttgggatcaaaaagatgggtatgcaatgaagaacatgagtgcaggagtggataaagtgattgtgaaccaaatcaagttggaagctcgccgtgacaagttatcttgctcggaccattggcaatggtgggattgggttgcacctgacaccgatagcatgaacgatgcgttgggggagctgacagaggcgtttccggatatgcggtattggcttcataagattccggaagtggaatcgaattatttgtccgtccgtttcgtgaatggtactgaaccagtcatatttggttcattgttgtatgcggtcaaaaatgagagagatgacaaacgtcaagataatcagatgtttttctatgtcgatcgcaataacctggttaccttgaatatggatgacaatacacgaggcattatgaagacggatgaacgtgcccatatgttacagcaatgtagtgaagccagggacgggatgtttgtactttttcgagctatactgcattactaccatgtagggatggatcattttgagatgaacctgcgtgaactggaacggaagatggaatcccgcaatgcccgaactttaatggaccagattttggccgcccgatttgaactgttatactggagcaatctgtttatcccctactcggaactgatggctgctgcccatgaggcttatctcagtgaaatcaacgaaaatcgatatttccagcagctccaacatcgagtagagcgaatggaacgtttgtttagtcactacgagaaagagatcgatacgttaatctccattgataatgcgatctccggtgtacgtggcaatgagatcatgaagacgctgaccattgttactgctgtgttcatacctgccacggcagctggcgcgatatgggggatgaactttgagaacctgccctttatcgacaaatcatggggagttgtactggtccttgttgtcattatcttaagcatgatcagcatgtatgtatggctgatgatgaaaggctggacaggagatctgctcaaagtgaaatcctcacagccttcagctgaagagacagagaaaaaaaggagcaacggaaaaacgtaagggatagcctactgttggttagtcctcttagtttttgtaatcttcaatataaccaagcaagtcagcgatatattggcccacaatcggcatattcacgaattggctgagaatgaatgccagcaaaccgagaacaacaaaggtacccacagtcagaccgagacctcgtgccatgcccgctgtaaaattggtaataatccgctttttgggactgctgtaattctcaataatatccttgatctgtgctctctccagactgtccgcaatctggtccagacgggtgttcaatcgctttacctcatgacgcaattcaaaaggatgctcgcttgtatcatactgctgtgccggtgttcctcccgtaattggagtattaccgttgattgtaactttactcatattatttgtcctcctcaactctcattggataaaaaatagccagctggagtgcagctggctattagtcactcgatctgtatcgccttacaggctagtcgagttaagttctttacgtgcatcttccttcgcttcaacggaagcggcagccacttcatcagatgcacgggatgcttcgttagccacatcagcggacgcttttctcacagagtccattacatcattgcggccttgatttaccgtttttgcaatgtcggaagttttggaagagaccgttttagccagttcagtggctttgtcacttacaacagttgccacttctttggtgcggtcagtaacgatgcccactttctcggaaaggtcaccacgcaattcacgtcccggtttaggcgcaaagagtagtgctgcagcagctcccagcaaacccccgatgaaaataccttttgcgaaagtcgaacccgtctgtacaggatattgctcttctgctttattcatgtctaatcactccttcttcaatttaagaaacaaatacgaaacaacgaacaccttgttgcccgaatcaggcagcctgtcttagcagtctggacacaagccccagcaagaaaacaaagagcgctgtaccaatgatggcagggataatggcaaagttaccgataactggtccccagttaccaagcaaaagtgctcccagccaggctccggcaaatccggcaatcattgcaccgattatgcctccaggcatgttgtgaccggcaagtgcatctccgatcaaaccgatgatgacagccatcacaatgctgataatgatgccccacataacaaccgcctcctttaaacttgatgtaggatgttgtctgttcgcgtttgcttacttcgtatataaaccccgtgcaaccctgtgaaacaataaagatgaggatgaatgaactggaaatcagaggaattgattctttagtggctttgtttaatgcctttaaccatgcagaagatccatgccaatccagcagtaaatccagtaaatacatctgtaggataatgaacgcccaacatgatccggctgaggccaatcaagaaaataaaactaataccacatagaacaggaagccacacaccggaagagttatgtcgctgtcgttcaatggcccagattacaaagagcatgccgtaaaagcccatggagatcatggcatgtccgcttggaaagctgtacccgtgaacgaccagcagatgatccagttcaggtctgcttcgtctgaaaaattccttcaataaggtgttcagaatccacatcatggcaaaacttcccgtgagcgcatatccatatacaacaaaccttggactgcgttgaatgaagaaaagaagagcaaaacctcctgcagccacagcagagattttgaatgagcccagtgcggttatgaatgcagtgtaagggaatagatgaagacgtgaatctgaattcagataaaataattgctgaatttgatcatccagacgaataataacatcagcacccaaccaggcacccagacctgccaggataaatacgaccgatgcgctgagggccagaccagccaacccccagttgaagagtggacgtaataacgtaccggaatttgaactgaatgaggctggtgaatacgttttgcgcggcataatgagtttctccttcagttattgtagtagatgaacatagatgataaagctatacccgaaacgcctgtcgaaaaaactgtaaaaacgtcgattttgtactatactatttaagatatcccatgcggcgtcgtgacgcaaagcagagatgaaatcgggagcacaaaggagagaactcgcatggagagtgccttgttaattaaagaataccgtgcaggcgttatggaatgcgcccattacggacacataagtattacggatgagtatggccgaatcgtatactcggctggtgaccctcattttagagcgttcactcgctcatctgccaaaccttttcaagccattccaggtattcgggcaggaattgccagtcactatggcctatcagcacaggagattgccatcatgtcctcttcgcatcgttcggaaccggaacacattcgggtgctggagcagttatccggtaaaattggattgggagaagaatgcctgatctgtgcaccaagctatccgcttaatgaagaaagccgtaatcaatggttacgtgcacaaggagagaaacggcgcatcttgcacaactgctccggaaaacatctgggaattctggggtacagtcagatgaagcaggttgatctgggcagttacgctgaaccggaacatccggtacaacgagaaattcttgaaacctttgccgacctggcaggtattgaggaaaaagagattaagcttgggacggatggctgcggctttccggtattttctttgccgttgtcggcattgtcgaacgcttatctgaagctcgcttgtccggatcttatcgctgatccttccacaagaacagctgtagagaccataacatcagctatgaatgaacatccgttgatggtaggtggcacggagcgtgtagattcagtgctgctggaagacaataacattgtagcgaagggtggattcaagggggtattcggttttggcctgaaaaaagaaagactgggaatcaccttcaaggtgcttgatggttccgaggaagagtgggccttcattacccaatccatcctgagacagattggttattcgaatgagagaaccattgcacgattggctgaagtgttcccttcggacatccgaaatgatgcgggtacccttgtaggtcatgcagatagtgagttcattcttcactcacttcaagatagcgtataaccttaagaaggggcgtgattagagttgccggaccccgggtaaagatgacataccaactggtattcatctatacaattcatatacacgcatggactgccgcggtaatgtggcagctctaaacccttggaggtggatgaacatgattaaagtggtgacatctgaagaaaggcacacgtcggatcgaggttggatacacagtgaattcagcttttcctttgcggattatgatgatccaagcaacgcccattttggctgtctgttggctcataatgaaaacacgctgatgccgcaagaaggctttaagaaacatccacatcatgatcttgaacttgtcagttatgtcatatcgggtacactcaaacatacggatagtatgggaacagaacaattgcttgaaccgggtacggtccaggtgatgagtgcgggtacgggagtggaacactccgagaccaatccgtcagcggatgaaccggtacgtttcctccagatgtggtttttgccatcggagcgtatgctgaaaccttcctatacgaatcggagaatagagccgcaggagcatttgaatcgtctatgtccgattgtatccgggcaagggggagagggaagcgaaggcgcattgcctatttcccaagatgtaacctgttacctctcccatttggagtcggggaagaagttgatgtacccgcaacatgaagaccgacggacacatcttttcctgatcagtggacatgtagagattcattgttcggatggcaacttcaacctcaagccgggtgatgccgcacgaattcgcaaaagttgtgatctgcaaatcacgagcacagacagtgaacctgccgaatttgttttggttgacctgccttaatgatataaacatgcgaaaaaggacctgttcccacggtgatgtggaaaacaggtccttctttttgctaagatttacgaagattacccagttccgaagcgacagcttccacttcagagatactgagatgttccttgctcaaaatcatttcatacaggtcaaacagatcttcatatttctcaagtgggaatgaagaagcttgcatggcggcaccgcttgccatacgaagtttggttttgatcgcttcaatcatatattccatattggctgctgttgcttgtgttaaatccatcgttaagttcatcccttccgtatcggaaactcttgttattgtatcatgattggaagcgctcaggctaatgcttttgcgaggaaaccaagcatcggttacaatgatggatacaacaacaggatttaacggaaacctgagtgtactggagggaatacagcttggcagcgtataagcgagaaatggttcgccatcaaggaagggaagtccgcaaaggcgtgcctgcagagaatctggttttatttttcaaaaacatcattcaacctcactctccagctgaaatcacgtttgtctgcattggtactgatcgttccaccggggatgctctgggtccactgacaggaagtttactgcaagagagtggaatggagaacgtgattggcacgctgtcttccccttgtgatgcagatacgctggaaaagaaattggcaattattcctgcacaccatgccatcatagcgattgatgcatgtctgggtccaaagcatgcggtaggtacatactatctctcgaataacccactcaatccggcccaatcggtcggaggcaagctaccccctgttggacaatatagtgtagcagctgtggttaatgcgaatggaccaaggccctattccattttgcagatgacctcacttcacttggttatggggatgtcccgaacgattgcagacgccgcaattgaagcatggaaatggagacaaacgtttcattcatgatatgtaggcttaataatatacaacctgaattatttaattcgcgcagagagagggattcatatggaaaaagtgatgtgtgatggaacgacgatttgttatgctgaacaaggtaagggagaagcactcattttgctccacggatactgtggcagttcatcgtattgggatgaggtcgtacctgaactggcacgcagctatcgctgtatcgtacctgatctgcgtggacacggaaaaacagatgcacctgtagggagttataccatcgaacagatgggaaacgatgtattacagttgatggatgagttgaatgtggaaaaagcggtccttctgggacactcgatggggggatatattgcgctctcgattgcacaacgtcacccggagcgtttgaatgcatttggtcttattcattcgacagcctatccggacagtgaagaagccaaggaaaaacgccttcgtgctgtatccaccattcagaccgaaggtatcgtaaattttgtagatggactggttcccggactgtttgcaccggaacatgtggaatcgctatctaagcatgtaacacgtgtgaaggaaattggataccagactgctcctcaaggtgctgttggtgctgcacttgctatgcgagaacgcccggatcgccgcgatgtgttatcggctacacctttacctgtattgctggttgcgggagagaaggatgctgttatcccgccagaacgtacatttacaagtgacaagccacatatcgtgcaagccgtgattgcgggtgcaggtcatatgagcatgtatgaagcccctgaagagttaattcaggtcattaaacaatttatggctggattatcgaagtaattgatgaagtgattaatgttgatatcattaaaatatagattggtttctggatgattcaacctcttgtggaggaggagtaaccagttccattccaaccgagcccctgccacgtccctttgggataggcgggggcttggtgtgttcatgtccagagcaaagacacgcgtgtcttgtttttggctttttgtcatggcatgaattaaaataaatataaaggaacgatattagggcgattgaatgtatagggtcgaatgatgagggggcatacagcatgttcagaaaagattatctgctccgcatgatggaggaaatgactgaagcaataggcaaagtgttcacgctcaaacagcagcgtaagcacaccgaggcattgtctgaactggatgagttgatgcgcaggcagtttgggttgaacttatctctactgaactcattgccagcagaggatgttattgaaatgttccgttttcgcggaataattgaggtagataatctgcagcaagccgcgaggctgattgaagaagaggcttacatctatcaagagaaggccagagtggaaggcatcgatgatcaggagagaatggacgcagaggatgacgccctcattcgattgatgagagcacttcatttttacctgtatgcattgaatcatggcgctaatcccaagttgttggacgcaccggaacgggtggagggtgtgttggggcttacgaaagaatatgaactccctgctcgaaccgaaagacagcttgccctctatcgtgaacaacaaggacgttacgaccaggcagagaacagttggtacaggctgctccagcttggtgatgagttcccggtgagctaccgagatgatgtacagtcgttctacgaaaggttgagccaactcacggatgaacaactggtgcaaggcggtttgccacgcaacgaagttgaagaggggttagctgaactaagtcgtcaagagatgagctcctaaatatagataggattaagtcctgttacatgcccttacttggagagggaacgtaattgtggtatggtaacggttgaccaaaccaaaccgaaagtgagatgtaccccgtggattcattgcgaaagcttatacaagacatctttgaacagaattcgctgattacagcgacctggagccagctgcgcagacgggacaatgtctcgtataccaaagtgcaagtcaagccggtgacactgaaaaatcagctgcattatcaatttgcatttcactataacaacaaagtgctgcacgagaatttgactccggctgaagcggcagagcgtatgactttgttatgcgaagagacgtttcgtcaaggcctgctctgtacgactgaggcagactatcaaattttgatcagcaaaaaatataaagtatccattctgaccaaatctgcttccaaaactgcggtggatctgtcgcataatcgcaagaaacaatatgtattagaagaaggcgtacctgtatcgttcctcgttgaacttggtattatgaacgaagaaggtcgtgtgctggcccgtaaatatgacaagttcagacagatcaaccgtttcctcgaaatggtgcaggatgttattccatatctgccggaaggacgtccactgaccatcgttgattttggttgtggcaagtcttatctgacatttgcgttatatcattatctgtctgtacaacaacggcgttcactcaagattattgggttggacttgaaggcagatgtaattgaacactgtaatgatctggctaatcgattgcattatggcgatctgaagtttctggttggagacatcgcggactacgatgaattgaatgaagtggatatggttgtcacactgcatgcctgtgatacagctaccgatgctgctttggagaaggcagttcgttggggtgcttctgttattctgtctgttccttgctgtcagcatgaactgtttgatcaagtagaggcttccgtgatgaatccattgttgtcccatggtattctcaaggaacgtttttccgcactggctacggatgggattcgtgccaagttgcttgatctgatgggatacaagacacaattgcttgaattcatcgatatggagaatacgcctaaaaacatattgattcgtgctgttcgcggtcaggctggcgaagtgacggagatgtggaatgaatacacagctttccgtgatttcattcatgctgatccatatttggagcgggcttgtgccgatttgcttcctggcgatggcaagcaggccaacgggaaatcaaaatcgagcaaagaaaccgttcaagattccgcaaattgcgacctttgctgagtgtgccaacgccaatccagggacatactgcaattagggtccctgaatgtaaaatgatattctatgcacatacttcgtagcaatcaacatcataactgtcagatgtatatcaggcagaaggacccgttatcgggatcttctgtctttttgttatgcatatggagcggtggaaggagggtggataaggatgaagaataggacaatggataagggtgttgtagggtatagacgagggtatgcggcgaatgaggaagtgatggaacaggcgtttgaagggtctcaccatgcaaatggtacagaatctgtagataacaaggacttatgtaatggggacaataaggttagtaaagacagtaaagacagtaaagacagtaaagacagtacatataatagggaagatacatacaacaaagatgatacgtataaaaaagaggataaaaataatccaaatggagctattcagaccgatgtgtcagggagtttttcttggaccttgaggagtgaacgtattttaggttcgggatgtactgttgggttaggcatactctctattgtcttgctgcttgcaggatgtatgagtcggggactgtactattcagcggatatgtaccctgtcctattgatcgcagcaggaagcatattgattatgtttttgcttttccttgtaggtattcgtccacagaaggcgagtgaacgaatacccatgtcattgggacagggtcgggggagactcgaacgaatcgttgagaaaatttttcgatttccaggaatgtggcgggtattatggccgctggggatgatgacatgttttgggctacatgcatgggtaggctcggtgagtaaacagggcagcatggatgagatgctgcggtggagcctacttgcgatatttacgctgctcactgcaatactggctacgcgcacggatggtgcgcgttggttagcttgcggttggcagatggcaggaggcttgcttgtgctaagcggcatccttgccgtatgcgggatattgccgctgcccttcggggtgatgcggactgctgaccccgagatcagttccgccggagcaaggctcggcggactattgcagtacccgaatgcgtacggtgccgttgttggcatgtacgcattggagcggctgatagccgccgcacgagtcatagcccggcctgtgccggccgggcgactcatcgcggcagtgctgccgctcatgcccgcgcaagccgcgctcctgctgagcgagtcgcgcggcgcttggctggcgaccggctgcgccgcggtcgccgcctttgctttgcagcggcgcggtgcccgcctgccgctgctactggccatggccgcgccactggcgtgcgcggcttggctgtaccgccagctggctgctgcccagctggcgcctgcacccgtgcccggcctgctggcactggccggggcatgggcagctgcgctgctcggcacgctgctgctgtgccgtctatggcacagcggcgccgccaaggctccgcgcgccgctgccctgacggccatcgtgctggcgggagccgccgctgcactgatggccgtggcctccaccgctgatcgcctcgcggcgggtgtcggcactggggtgtcccgcctagagatgtggcgggacgccctccagctgtggaccgaggccgcatggctcggccacgggggagatacatggcgcaacatgtttcgcgccattcaatcctcgccttatgttggaggcgaggttcacaacggcctgctcgatctcgccctggacacaggcatgatcggcatcctgcttgtcgcagggtggtttctcctcaccctgcgaagcatcttttattttgcaccgcagctcatgccatccgtgcttgtttttggcctgcatggggtgatggactttgactggagctttacattattttggatgctcttcatctggctcggtgcttgggcagtcgcattgaagacggaaacagagggggtccagcgatccggcgtaactgtgaaatacactcttatcagatccaaatcgggatctaaattgagatctaaattgagatctaaatccagatctcttttcttgcgatatttatcaacccaatcccacccatcagctgtcccgatgcgttccttctttcatatttttcagcgagtaactgctcggctaataagggtatccacagtgatgatcatccttttctggattggtggaacagtctggctgacctctcgatatgccgtagcagaagtgcagtaccgtcaggcgatgtctgaaccggatggcactccagcacagaaggtgcatcttatggctgcccttcagtctaacccgaatcgaccggatatcgtgatatcccttgcacgatctcttccgggacgagaagcagaatcattccttttgaacagcttgtcccattccccgatgcaccctcagatttacatcgaactgggacgattggtagcccaattcggcgaaggacagcaggctggagaatattttgaacaagcgatcgcattgaatcggtatgatggcattggtcaatcctcggctttgtattggatggagcaggtagcgaggcgggaatggaaggcaggattcacggatcgagcccaacagactgccgccgctggtgtccagatgtatgaacggtatcaactgctgacggaggaagtggaagcaggaaacgttcgcaatgatcgtcgttttgtactggaagaacatgctccaggctatggagagaacctgcgcaggcttgcttcggcttcttctcctccgtttactccagagttgaccaagcggagaccttgaatcactgctggatcttgacgtttacccaagctatatgatgatggatgtcagcgtttaaaagtctgggagtccaaagctggctgctcctggctgatgggtatgggattttctaaggaacacaggacgttttatttggcctttagctcctcttttcaaattgtaaggaacatcagacacgttatttccggaaattccctaacaaaaaccctataaagtccaaaaattccgatataacgtgtctcagattccttagatttctaagagtgcttcaaatccttgaataagacgcctcagattcgttaccgctcatggacttgggcttgagtatgagtatgagcatgaacatgaacatgaaaatatactctcagcttatattcatgctccccgtggtggtcggctccatgctctgctcgatccgcaagccagaggacgaccctgaactccgcccagagcgaagctttacatcataagtgagcaattcgcatttatgttgtctctatcgcttgctcgtacgtgaaggggcattaacatcacacgttaaggacacagtgcccgtgccctcacccgttcctaacatgttcagattcgcttcagctttgctgcgtctttcagtaggtttgaagacacagctatctgcctcattcctccataatctacagacgataaccgccaaatgcgtgctgaaacgcatcttttaatggttcaacgtctacttcccacatcgtggcgatctctgcactgacatctgtgttccaccactcacataatttcttgcggttgtcgcgattctccccaatccagagcagatttgtgatcaccttaccgtaataatattcttccgcctgtttcatccgttcgggagagacatatacttttagccttttggctgtccggtacaattccttgctgcatgctctgcgaattcctctggcggaaggaaggttttgaccggattgcgtatgtttgaccggcggagaaccgggtattgacttgtgtgacatcttctcacgctcctctccccataccatatgcggactgctgcgaacgggacactatcccaacctcgtgaagtagcaacgtccacagccctgtgataaaatagggacgaacatccatggtgcggaggggcaccgccaatcaggatggagaaagagggttgagatggactttattcataaccttgttggccaattgttcgattggattcaaagtcttgggtactttggaatcatgcttggattaatgttggaagttatcccaagcgaaattgtgctggcgtatggaggttttctcgtttcacaaggtaatatcaacttcttcggtgctatgatttttggtacggtgggcggtgtgattgcccagttatttatttactggattggccgttatggcggcagacctgtgcttgaacgctacggtaaatacatactcatccagaaaaaacacatcgaccattccgaggagtggttccgcaagtatggtacaggtgtcattttcacagcgcgttttgttccggtggtaagacatgcaatctccatcccggctggcatcacgaaaatgcacacaggcaaattcatcttgcttactacactcgctgttataccttggactgcattgtttatatatttagggatgattcttggagatcaatgggagcatattgatgagaaagcggcaccatatgttatgcctattttgcttgtcgctctcgcccttatgatcgtttatgtacttattaaatggatgaatgttcgtaaaaagaaaggaagtgtctagtcatgggtaaacccaacttgtctcacaaattcggtaaaggtcttccaccgaaagattttatcgagagtatgaccaagaaccaaagtgaattccaggccaactatgatagctttacttggtcgaacgaagaggatcgtgagttctttgagagcctgaaccatcgcgatgatctgcgtgtgttaattctggctgctgactggtgcggggatgttgtccgtaatattccggttgtgttccaagcgcttgaaatctcaggaattccaacagaagttctgattatggagaaccatccggaagtgatggatgagttcctgacgatgggtggccgttccgtgccagtcgttatttttgcagatacaggtggtcatgtgttaggtcagtggggacctcgtccgcagcatgtacaggaagtcatgattgaattcaaacgccttaatccggatcgtgaagcagcagattatcaagaaaatttggctgtagcgcgtcaagagattggtaaacgttatggggaaggaacggaatcacatgcggccattatccgtgagctgcgtgaactgatttcgggttactaagccgatatgcttaacattcgtacgtttacactaggcccgcttcagaccaatgcgtatcttctacaaggagatgatccgggcaaagccgtcattatcgatccaggcatgaatccagggccgctgcttaaggcgatccaagacttggagatcgaagccattctcctcactcatgctcactttgatcatatgggtggggtagatgagatccgtaaattgaagggatgtcccgtttatcttcatgacttggagagtgactggctcaccaccccgaaattaaatggatctttgaattggccacaggcgacaccaccgctttcgacagatcctgctgaatatgccatggacgaagggcagaagctgaatctgattggtcatacgtttaaagtgttccatacacctggacattccccaggcagtgtaagtttgctttgtgataatgacctgtttgccggtgatgtgctgttccgcatgggtgtgggcagaacggacctgacaggaggccgtgaacgggatctgattgattcaatccagaacaagctttacacctttgctgatgaggttaaagtatatccaggtcatggtcccaaaacgaccattggttatgagaaacagaacaatccttacgtgtccgcaagataatccgacatgatatgtgaagaaagtctggacaagtgacaactttttcattagaatagcaattagttgttacaagcgttaaggcatcatctaactgaagcattaccaagaaacacccaacctcgcgaagcacgcagactgtggtctatacccggtttgcgttctttttttgttttcagcccctttttatcgcaaaatcagcctttattacgctacatagagatgcaagatgcgtttcatcacaagacagtttgagaccaatagcaagttagcagcaagtacagattgatttagaaataataaatttaagaaatagtagatcatgagagtggggaatatcaaagtggagaaaacaagagttattccgttgaatcagcgtgtcgagtatccgatcattgaagaaaatcgtcgcatattggaaagtgggaaaagagaaacaggtactgagcgagctttaatacataaccccagcgtgaccaatgaagtgatgaagtctcagcagaatatatggacaagccgtgttttaagaaacggagcccgcaaccaaccgtggttcgacaagctgcaagattaccggaatcaagtctgattgcccgggaaattgtcgggttaattttttttgatttcattgaacgtttttgcagagtctgtcgtattaactccagattgaacgggaagcaggtgatctcatgataaaggcagctgagctggaagaggtacgcagagcgttatcgggagacgatagcgcactcgcagcgttgttgcaacgtcactacacgtttgtgtataagtatcttgtcaaagtgacgatggacgctaacctcgcagaagagacggtgcaggatacgatgattcgttgtatggaaaatatccatcgatatgatggcacgtctgccttttcatcatggatgatcaccattgcgactcgcatctatatcgataagacaagacgtaagaagagagaacagaactggcttactctcatccgggatcaggctgtacgtcgattccgctggcagcttgagactcgaaatgaagaatggacagatgttatggatgcgatgacaagactgacacccgaacatcgtgttgcagtgctactgaagcattattatggatacggatatgacgagatcggggaaatgctgggtattcctgcgggaacggtgaagtcacgcacagcttatggtctccgtcagttaagaaaggagctggaataaggatgagcagatcagatgatgcacaagaacaagaagttgtagaacgattgcagcaacacatgaaagtgctggatgatgcatttgagccgacaagtattccttctttgggtgcacttgaagcccaagtcagggaacggagacagattagaggtcgagccaattggatcgagatgatatgtttttggttggttggattgcttgccattacctttagtgcattatttttcgtatctgctccagctctatatctgggaattcaggctcttggtacagctgttgcggtgattttggttgtaatctgggccggacggcgccggaaggaggttcatcatgaataaaatgcattattcattggatgagatttctccactgtggcttacattgcttggcatttttcttctggttcagggcacatggatttttcaggacgcacgcagacgtggacgtttcccttggttatggggattatggggcatcacaggatttcccatgccgctcataatatattggtttgtcgtgattcgatcacagcgcaagccaggtgcacgtaatcggaaataacatcattttaaaaatggaaaaaaagattttgcacaaatatgttgtttaattctagtattcctagacatcgttattcttttctagtagactatacaaataaatattaatgatagactaccaggaggttagacgatgctgcgattaggagagaaggttgtcatcgtcgcggatgcgtttgagcagaatcttcctgtgggggaatatggtttcatcatcgcttatgaccggaatccggacaatgcgttcgattacgtgcttcgagtgccgcaggtgaaccggaacttttttgttccatccggcgacgtcgatctggaagaggttctgctgaagcaggaagctgagcgggtcgagcgagaagcgttgatagattacgcccttgcgacacacaatgagaagctgtttcatcatctgatgaacggagattttcaagctgtggaagaggaagaggaaaccgcgaacgatgttatgtcacaggcggattttataaagcaggttaatctgcgtgcatggatttagaattttaagagtcggctgatgccggctcttttttattttataagtttgattttagcttcccggaagcctgtcaggtcatttgcattgaattgtcgaactatctcacctataatgaaaaaagttatcttgagactttagcccgttaaacgagcgattcgtttcagatcgtttcgggaatcagaacgaatgaaggaggcatccgctaatgagtatttcgaataatgacgttcagcatgtggccaagctggcccggctcaacttgactgctgaagaagaacagaccctgacaggtcagctgaacgcgattttaaaatatgcagaaaagctgaatgagctggatacagaagacatcgagcccaccactcacgttctgcacgtaagcaatgttatgcgtgaagatgagaccagagaaagcctgtcgattgaacaggtgatgcgcaatgcaccggaagaagaagacgggcagtttaaagtgcctgcagtaatggaataacggataaccggaaggaggacaaaaactgtgagtttatttgaacaatcgttgcctgagttacataacaagctgcatgccaaagagctgtcggtcagcgatttggtggatcaggcgtatcagaacattggcgcgcatgacgataaagttaaggcatatttggcactagatgaagaacaagcacgcgctcgtgcacgtcaactggatgatcgtctggttagtggcgaggagaaaggtttgctttttggtctgcctgtaggcattaaggataacatcgttacgaacggactgcgcacgacgtgtggtagccaattccttcgtaatttcgacccggtgtatgacgcgacagttgtcgagaaattgaaagctgcggacaccgtaactattggtaaactcaacatggacgaattcgccatgggcggctccaatgagaattcaagtttctcccctgtacgtaatccatgggcacttgatcgtgttccaggaggttccagcggtggttcggcagcagctgtagctgcgggagaagcatacttcacgcttggatcagatacaggtggctccatcagacaacctgcttcgtattgcggtgttgttggattgaagccaacgtacggacttgtttcccgctttggattggttgcatttgcatcatccctggatcagattggtcctttgacgaaaaatgttgaagattctgcttatgtattgcaagccattgctggttatgacgccaaagattcgacatctgcaaaagtagaaattccggattatttgagcggactgacaggtgatgtcaaagggcttcgcattgccgttccgaaggaatacatcggtgaaggcgtagatccacaagtgaaagagacagtactgtctgcattgaaagttctcgaagggctcggggcaacatgggaagaagtatcccttccgcataccgaatatgcggtggctacgtattacctgctggcatcttcagaggcttcttccaacttggctcgatttgatggcgtacgttatggcgtgcgtgcagacaatccggacaacttgctggatctgtatcatcagtcccgcagtcaaggttttggtccggaagtgaaacgacgcatcatgctcggaacgtatgcacttagctcggggtactatgatgcctattatctgaaagcacagaaggtacgtacattgatcaaacaggatttcgacaatgtatttgccaaatatgatgtcattattggaccaactgcgccaactacggcgttcaaactgggttcacaggtggatgatccacttacaatgtacttgaacgatattctaacgattccagtcaacttggctggtgtacctgctgttagcattccatgtggattctcggatggattgcctgttggcctgcagattatcggtaaagcctttgatgaaacaaccgtattgcgtgtagcgcatgcgtttgaacaaaatacagaattccacaagcagcgtccgcagctgtagactgcccggaacggaggaatatagaaatgtccgcatctaaatatgaaacggtcgttggacttgaagtccacgtggagttgcataccaactccaaaattttctgtggctgctccacagcttttggagctccgccgaatacgcatacctgcccggtctgtctcggacatccgggtgtactgcctgtattgaatcgtcaggcggtagactacgccatgaaggcagcgatggccctgaattgtacgattgctgatgtcagcaagtttgaccgtaaaaactacttttaccccgactcaccaaaagcctatcagatctcgcaatttgatcaaccaatcggtgagaacggctggattgatatcgaagtgaatggtgaaacgaaacgaatcggcattacacgtcttcacttggaagaagatgcagggaagcttacacatatcgatggcggatacgcgtctttggtggactttaaccgtgtcggtactccacttgtggagattgtatccgaacctgagatttcttctccggaagaggcacgtgcgtatcttgaaaaaatgcgtgcaatcatgcagtactgtgatgtgtcggacgtgaagatggaagaaggatcactacgttgtgacgccaacatcagtttgcgtccacatggacaggagaagctgggaacaagagccgagctgaagaacatgaactccttccgtggtgttcagcgtggtctggaatatgaacaataccgtcaggctgagattctggatgatggcggtgaagtggttcaggagacgcgtcgctgggacgaaactcaagggaaaacactgtcgatgcgtggtaaggaacaggcgcatgactatcgttatttcccggacccggatctggtgaatttgcatattgacgaagcctggaaagagcggatcagagctaccatacctgagcttccagacgagcgtaaggctcgttacacggctgattacggattgcctagttatgatgcagaggttattacctcctccaaagctgtggcagatctttttgaagatagtctgaaatacactcaggatgcgaagtccgtatccaactggatcatgggcgacttactgggttacctgaatacgagcaaccttgaagtgactcaagttccactgacaggtcaaggtttgggtgagatgattggcctgcttgagaagggcacaatcaacagcaaaatcgccaaaacggtattcaaggaaatgctggagagcggcaagcttccacagcagatcgttgaagagaagggtcttgtgcagattagtgatgaaggcgccattcttgccatcgttgagcaggttgtagcgaataatcctcaatccgtggaagactataaagctggtaaacaaaaagccattggcttccttgttggtcaggttatgaaagaaagtaaaggcaaggcgaatcccgctctagccaaccaactgcttgcagatgtactgaaccgctaatccttccggtgaggccggacagaaagaggctcgtccctgtgacagcctctttttggtattgatagatacaaatgtatttcggacgggggaacggatatgaacattcaaccattgtcactgagtgatctggagacgttgggacagttatggagactacaacatgtggcctatcgattggaagccgaaatcatcggatttcaggagattcctcctttgatggatacgatggagacacttcgggattgtggagagagtttttatggctgtatccatgatgacggagagcttatcggggctgtcgctgtagcggaggaagaggagaatacactgaccattacacgaatgatggtgcacccggatcactttcgtaagggaattgcggcatctttaatgacatatgtgttggaacaacatgcggatcttccgcgttatatcgtctccacaggaacgctgaatcaacccgcagtgaatctgtacaccaaatttggttttaatcccgtggaggtcacacagattgcacctggagtggaattaacgacttttcacaagaataaactttaataatattaacaacttgaggaggaataccgactttgggcgatccctggttcattgatgagtggcacattttattacgattattgctggctatgctgcttggagggctcgtaggcctggagcgggaacggtccaatcatgctgccggtttgcgtacccatatcttggtatgtcttggctctgcactgatcatgatgttatctgtttatggttttaaagattttgctaatgaattaaatgtaaggatcgatccagcgcgtttggctactgctgtaattactggtgtcggattcctgggagcagggacaattctcttcacgggaaaatccattaccggactgactacagctgcttcaatctgggttgttgcagccattgggctcgcagcaggtgcgggattcttttttgcctctatcgtatccaccgttctggtattgcttaatctctgggtatttaacaaattagagctaaggtatctacgagggaacaaactacatgttgttacacttcataccttgtcagaaccgggttttctcgaacaactgtcttcatgtatggagcaggagaagatcaaaattcgtaaaattaccgtgaatgaacaagacttggcttatgcagagatggtgtcggttgaacgtaaaattgagattgtgttacatgttcaggtaccgcatgatttccaaacggtaggcttggtatccaagttaagacaatgggaacacgttaccaaggtgtcgatcgaataatgaattacaaccctccccaggccagtagtgccggagggtttttggtcatatccatatttcttccagttactctccttgctctttagggtactatctaaccaaatgcatgaagagcggaaggtcagatcagaagagaggagtatgttatgaaacggagacgtcaattgaaccaaaagactcgtacagttcagactaaaccggtcagaaatcggactcacaagtttattgcgggattgctgagtgccattattcctggtctgggtcatatttatctgagattgtacatgaggggtttgacctttatgctgcttgttttgcttgatctgtcagcagtgttgtacttctcatctattggtatacagatcaatgtgccattgctcatcttgctggctttgtgtattccggttatttacttttacaatgtatatgatgtgttgcaatctgcagattgggtcatgatgcgcagacgtagagcagtaacccaggcaacttcggacaagccgataaccaatgaacgttctacacgagatgcaatgatggtctgggagagaggcatatcgtttggattacttctgattgtgggaggatctttgatggtactgtttttccgtaaaccacgttggtttcaagagcttctcgccatgtacggcggatattcatttgcggttctcatgatcgtaggcggtttgcttctgtttggtcgtgagttctgggtgatgttgaacaagaaaaaattgtagtggaaacgatacaaggagggaacgtgatgaaccgtaaagtccgggttggccgctatacggctgccgccttaatcatagcggtcggtgtgctgttgattttggataaacggtggggaacggactacgtatatgagatggtggactggtggccatttttgctcgttgttttaggtgttgaatatattgtgctgttcctgtggacacgcagaagaaacaaggtgcaatcggataacccgagcaatcctgatgagcaaatcaaagtacgtttcagacccgatgccaaaggcattctaacctcactgattttggcagcttccgtatttatcgtcaccgagcaggatcactacatgcacttatggaatagagtgagtctaaatctcggagcggcatccatggactacagtcaagcggcagggtatatggaggataagggcacgattcgtgtacctgttcgcatggatacgtcagatctggtggttgaaggtgtcaacggagatatctcggtacaacgcggagatacggatgagattgaagtacggacagtgatctgggtagatcagacgacggaagtacaggcaaaggccgttgcagcagcctcttttgtagaggccgatggtacaaaagtaatttatatcaaagctacaggcaagacgtatggagacaatgaaaaaacacagccacggatgaatcttaccattacgatcccggatgatcgtcgttttaatctggatattcgaacttccaatggagccatattattaaaccgtccggaagccataagtaccatactggccgaaacgggtaacggacgtattcggattaccaatgctgttggagatatctccgggaaaacgttgaacggggatgtcattgtggccaatgccattggtaatgtcgatctggacagtaaccgtggagatatgaaggctcgcggtatttccggcgatgtagatcttgctacacaagtgggaagtatcagtattgcggactccgttggtgaattcatcgcagagacacgcaacggcaatattacgctggatggagccaatctgggaatcaaagcccaatcacttaatggcagtattaacatcgtatctaccaaagtcggaggggactgggatgtgtacagtgcggtgggagccattaacgtattacttcctgatcgtggagactacagtcttgcgggttccagcagttatggagatctaagtacggatctgccgttcaaagtacagaataaaaccatagaaggccagctcggtgagggcgagtacagggtgaaaattgaaggcaacagtgatctcaccattcagagcaacccggctgtgtctacacctgaaacagttacacctgattctgaagatacggctgagaatctggaacagactaccgaggacggaccaaattcccagtaggattctacagaggttccttgactgccgcgttgacaataaacttgtaatcgccgtacaataaatgtacactggcaagattacacggcatgaaagatggattgtcgttcttaatggccgggaatcaactctgagcgaggagacagtaacttactcttcaccagagaatgaaaggtaaggcggtgggttttatggcaacacgtgtccaacatgcgttggagcatctgaaaacgaccggtgtccgtattacaccccagcgtcatgccatattgaactatctgatggaatccatggggcatccgacagccgatgaaatttaccgagcccttgaaccccaatttcccagtatgagcgtggcaacggtatataataatctgaagatgtttctggaagctggcatggtccgggaattgacatacggagataattcaagtcgcttcgatgccaatgtgacggatcattatcatgttatctgtgatcaatgcggcaagattgaagacttcagctatccttcactcaaaagtgtagagcttcaggcggagtctagtacaggattcgaagtacacggtcaccgattggaagtatatggcgtttgcaaaagttgcagggattaagagagttgaattacaatattaacgtgcagaattcagtatggattcttcacgtttttttttagcatttatgcaaaatgctcatctttataacaacttatgcgcacatccttatgatcagcataattaacggaggtagacgtttgggtagaaaaagcagatatacacgtcagaagcgacgttcattttggcccggttttctcggggcttgtctgatcgccgggggggcttactggcttataacaaatttatggttgaaccagacccatgaagaccccgactgggtaggaagaagccagcctatttttgtagatgggcaactgatggatggagacgctctgggtacaggagatcaactcaagttgcctgtagatgtgctgcaagaagcgattgatgcaggcatacgttatgaatcagaatcgggagatatcattattgcctctcctcagcgagtccttcatatgaaagatggaagcacacaagcagaacttaatcacaaagattatcctatgacagttaagcctgaggttaaggacggagaagcctatattccgctcaaacctttgaaagaagtatatggcataaccgtacaggaagattcagtaacaggtgctgtgctgctgatgcgtggtggagacatgatacagtatgcagagattgatacgttatcatccaaagcggacaagacggtgccgttatataaacgtgggggagaatcctcaccaatcattgccgacatggaaaaggatgcaagggtacgtgtatggcagacgggtgataaacagagttttgttcaactcgataatggatatgccggatatgtagataatgattatattgtcctcaccgagaaaaagaaggtggacttgcccaagtatacgctgactgcagcagagaagaagtggcagaataaaccggtaaatctggtttgggaagccgtgtacaatcgtcagcctgatgtgggctctatcggtaaaatgccaggtgtgaatgtggtcagccccacatggtttcatattacggatggacagggcactgtgaaaagcaagggaaaccaagcttatgtgaactgggctcaccgttcgggtatggaagtatggggactcatggataacagttttgacccggacgttacaaaagaagctgtagcttcttacgagacacgcacgcatattattgagcagatgttagagtatgcacagacgtatcaactggatggtatcaacattgactttgagaacgtgtataccgatgacgggccgaatattacgcagtttgtgcgcgagatcaaggcgatggcacgtatacatggattgatgttatcaatcgatgtaacaccgaaatcaaacagtgagatgtggtctgcctttctggatcgccgtgcattaggttcttttgcagactatgttattgtgatggcttatgatgaacattgggcggccagtcccaaggcaggttcggtagcatctctgccttggaccgaggcttccatgagacgcatacttgaggaggatgaagtcccttctaacaagttgatcatggcggttccgctctatacccggatatggacggaagagatgaatgatcagggtgaggttaaagtgtcttccaaagcggtgggcatgaatgccattgtggagctgattcaagagaagaaactcaaacctgaactggatcaggcaagtggacagaactatgtagaatataaggaagacggagctaccaagaaaatatggatcgaagatgccgtgtcccttcaggcgcgtgtggatttgattgcttcgctgaagctgggcggagtagctgcgtggaatcggagttttgctaatgcttctgcatgggaggtattaaagcaggctggttacaagaaataatttactcgaactcagagtgtctgcgtgctccaatttattttcactaagttcaaagtttctccttaggtaccatcatacgtgcagtctaccgttttattggtcgtagaacttataacttaactttatatcttagctattgataacagcaacaagagctcacttataagccatgtccaaaaaggtccggtaaacataccgggccttttttttgttcttcaatgaaattaaggtaaaagacatttagcggttggagatcatatcgtgctaaccatcggtggggggaactgttgtagaaggcgctttcagttgttgactggtcatgttggctttattagggtccagggtgaggatggtatgacagaacatacaacgatccgttttgccaagcatcttggttaacttcccgcattccggacagtcgacttgtactgcactggtggagagcatacccgcccagaaataaatggctagactggccatcatggcaatcagtccgatgacgagtcctacagctgcgaataccttgcctgcatgtccccagaaaacaatcccggctgttcccagtatcattaggcccatacctagcatggtcagtagtaatccccaagtgcgaaaagcattaatttttgctgatttaaaaatcatgaaaaatgctcctatcgtatgagtagtattggacctggaaaagaaggaaacttcagtctggatgtagaattacattataactgacttggcgcttatctgccatgaaatgtatggagggaatcgtggaattaaagaaccttgcttttttgtccgaacagtcggaagagacaggggcagttggggctatcgcttattcccacccgggagagcgattccacggctccctaattcaagatttcgaattattagtacttgttgttcataatgatgatcaattgaagtcgacggtcggacattacagatatggtgatcttcgttatcagatgatctatgcgagccgtcatgaattaaagagtagtgtagtaaccgggaatcataataatctcacccagtgtctgattgaaggtgagattatctgggaagcggacagcgccttaagtgatttgcgagaagaactgtctacctttggggcagaattgcgtgagcagaagctgcttcatgaattcaccagtttcttgagaatgtatgtggaggccaaacgtcatattcaggaaggtcatgttgtagacgcctactacaatgtattagaggctctggggaactgggcaagaattgtattgattgaacaggggatatacccggatcatgccgtctggacacatgtgcagaatctggatcgcgctttatggaaactttatcaagagcttaccgtaagctcggagacgctggagcagcgagtagagcttgtcctgcttgcctgtgagttttccgtaatgtccaaaatgagtgagtgctcagaactgctgctgcgtgtgttaagaagtcgcaaggagccgtggagcatgaatgaacttgttcatcatccgcagttaagatttgttcgagaagatctgcctttggtaatacgtaagctggtctttcgttctattgtaaaagaatcggcaggatggccatcaatcggaggagagggccgggaaattcggtattggattgaggcataaccttctccagaggcctgacattatattgatcacataagggaggggaaaccttccttttttgtttgtttaataatttataaaaagatgttgactctcattcacgatatatgatacattatatttcgttcctcaaacgagattatcgtcaacaaacgataaattcttcagaggaaaagtgaagaactaaagcttcaaaaaagaaatcaaaaaaaattcttgacgaaaacaaacgaaatgtgttacattatttaagtcgccgccgaaacttggttgagacgaaaaaagaagtgaaacaaatcgtgtttgatctttgaaaactgaacaacgagtgagtaaacattctgcttgcagaatgaaaagcgaaagtttgaa

SEQ ID NO: 11 - DNA, 212189 bp, Paenibacillus xylanexedens
  source 1..212189: mol_type = genomic DNA
ctttgcaagctctttttttaagtttctttcgaagcttatttcatttgcttgccgcaccgtgtaaaccgtgttttcttggccggaattagaatataccatgtacagatattgaatgcaagtctttttttgagtaattatatataactctataatctttctggtttttctacatttccacatttatctcacgtaaaaggcctctctataaaagaaagaccctctcatcaatttactttaatatctatttgttatccgataacctcttggatgtgaagctgccgttgctgcatcagattaatgatggttccttctactgacaccataggccgtgtaggatgatctcgatcagagaatacgatctctccaatttggttattgctgagttttactcggatgccattatggatctgggtcgaccgttgaacaaatacacttacaattgcagggtccaatttcccaaatgcctcactttggatctgttctaggactaggtatggtgattgtgccttgcggtagatcttctccagcgtcatggcgtggaaaatatcagcgatagctacaatcttggcataaatatgaatctgcgtcccactaagctgcaacgggtagcctgaaccatccactttttcatgatgctgcaacgctgcaagtctggctccctcattaatggcctttgcctgtttaaggatctgataaccatatttcgtatgctgacgaatctcttcttgctctgtagccgtcaacgtggatggtttatggagtatctgcggatctaccttgttgttaccaatatcatggaacaagcctgcaaaagccacttgcatccaatccttggaggggagatcgatccattgagccagttgataggatgtgatcgcactcagtacggcatggtgatatacataatcatgttcttgcattactcgtggactgaaggtaagcacattatattgtttaagatgtgcaaacacagcctccaactgtgtacgtaactcatagaccggtaattcagccgctagagaggacaggaaagcatttttggttagaccaaccatcttctcatactcatcctgcaaagacgttactacaggagctgtggtgacgttccctgtcttccctgcccgttcaccattgttatcattggcagaactttctgcgggcacagatgcacctttggttcctgtactactcgacgccattctttcttgttcaatatctacctgttgaatcataaaggctctgagcacttccatatccttgggtaaaatgacttttcccttctgaagcagaacgttgccgcgaagtgtttgcacatcactcccaagtttgagtcctggtttgacttctgacagggtgattaatcccatgtgtattcccctcactcatcgttcttctatgttaatacaaacaagaccatagtcccggtttttcatgatatttcccattatattactcaggaatcaggctgtacatcccagattcgaaagaataaaagaagagattcctttatacaaacaaaagggctcccggtgggagccctcgcaatcttcttccaatctcaaagagatcagtctttataaaattctattttatgcttccgaaccggaatcgtcgtcgccctcaacttcattaacctcagcgtcagaaacggtgccttcttccaagcttacttccggagcttgggactcctcgccttccaagccttcaagcgactcatcgtctggttcctcttcatttttgtcaattcggctgactgtagctactgaatcctcgtcacgaatatgaatcagcttcacaccctgcgtgtatcgacccatagtggatatgccttccatgctcatccggatcaacgtaccgctggacgtgataatcatcagatcctcttcggttttaaccattttgaggctgactactgagccgttcttctctgtgacattaatagtcttgatccctttaccgccacgagtctgcatccgataatcactgacaggtgtacgtttaccgtaacctttcgctgtaacgatcagaacatcaagctctttatcaactacatccatgccgataacagcatcctgttcatccaatgtaatccctttgaccccggttgcgcttcgtcccatggaacgtacgttaccttccgagaatcgaatagacattccgtgagctgtacccatgatgatctcttgcaatccatcggtcagcttaacatcgatcagaacgtcatcatcacgtaaggaaataccaatcaagccgcctttgcgaatattggtgtaatcctcaagtggcgtcttcttcacaaccccttggcgggtagcaaagaacaagtatcggtcactttcgaattcctggaccggaattacggcattgaccgattcgccctgctcgatctggatcaggttgataatcggcgttccccgtgcggtacgtccaagctctggaatctcgtaagctttgagacggtacactttacctttgtcagtgaagaacatgaggtaattgtgggagttggtcacaaacagatgctcgacaaagtcggtatctttcgtatccatacccacgactccacgtccaccacgtttctggctgcggtatgtggataccggcagacgtttcacgtagcctgtatgagtaatcgtaatgataacctcttcacgtggaatcaggtcctcatccagaatactctcttcacctacagtgatctccgtacgacgatcatcgctgaagcggtcgcggatctcttgcagttccgtactgataatctcaagcaccagatgctcattggccagaatttcgcgatactctctgattttgaccatcagttcgttatattcattttcaatacgttcgcgttccagacctgtgagtcgttgcaaacgcatatcgagaatagcttgagcctgatcatgactgagtgagaagcgctcaatcaaaccttctcttgctgcatccgcattactggatgaacgaatcaacgtaataatctcgtcgatatgatccagcgcaatacgtaaaccttctagaatgtgtgcacgagcttcagcctttttcagttcaaactgcgtacgtctgcgaataacctcaatctgatgctgcaggtagtgatacaacacttcacgcaagttcagaattttaggttctttattaacaatcgcaagcatgttaatcccgaaagtggattgcatcgatgtatgtttgtacaggttgttcaggacaacccccggattcacgtctctgcgaagctcaattacaacccgcataccattacggtcagactcatcacgaaggtcagtaataccatcaatctttttatcacgtaccaactcggcgattttctcaacgagtctcgccttgtttacctgataaggcaactctgtaacgataattcgtgccttgttgttattctcttcgatgttggttttagcccgcatcgttactgaaccacgtccggtctgatacgcctggcgaatgcctgaacggcccaaaatgtagccggacgtagggaagtctggtccttgaatgtaatccatgagttccatggatgtaatgtccggattttgaatcatggcctgtacaccatcaatgacctcacccaggttatgaggaggaatattggtagccatacctaccgcgatcccgccgaccccattgacaagcaagttaggaaaacgagcaggcagaacgattggctcatgttcttcaccgtcatagtttggttggaaatcaatcgtatccttgttgatatctctgagcatttccatagcaatcttggacaaacgtgcttcggtataacgcatggctgctgccatatcaccatcgaccgatccaaagttaccatgtccatctacatgcatataacgcagggagaaatcctgtgccatccgtaccatcgtctcgtaaacagcagagtcaccgtgtgggtgatacttaccgataacttcgccgacgattctggctgattttttatgtggtttatcgggtgtcatgccgagctctgacatcgcgtacagaatacgccggtgaaccggctttaatccatcacgaacgtcaggtaaggcacggctaacgatgatgctcatcgcataatccataaacgattcacgcatctcgacgcctatatcccgatctgtaatctgagagttcatttcttccgccatgctggacctccttcttgtccttcaacaaacgttccattccgtcatgcaaaaaagttgattatatgtgaaaagcctaacaaggctaaaaccgcgcaagaacgctactctttattatattactttcacaaaagttacacaattaaacgtccgctgggcaatagcctttcttccgggaacttctgcgtgtctggggatacgccctgccttcctccccaattgcacatacaatgctagaaaaacggcatatgtactgtgcctaccgaggctaaagccattcccgtcctacgatcaaactgcaaattgtgcagctcatcgcacaaaacgccatatttctctattataccactgaaatcgtctcttgtcctttgatttctccgtgtctggtccctctttagaactgaacaaaacatgaaaggactgatgaatcttgggtatccaacgcgtctccagcaaatgggccaaaacagccgtgttacaacgcagtcgcattgtgaatgaatatatcccagtgacccgaaaatatagccgtcaaactctggaacgaatgactgaattatttgagtccaactatatcaaaccggaccgtggcacttacggtaatggcgttatgcgggtgagaacaacccgtttatacgaacctgttgttaattccgaagattccaccacagatgcagaggtttcggaagaaaccaatgatcgaaacctgcctgatgaacccgaagcaagtgctattatctccagagctacctatctcacaacaacatatcatctccaatacggtacagaggagagatcatttcattctctggacgaactcgaacgagcactgaatgatcgcattcaggaacgtgattatatcattcaacagggaatatcgctgatgaagcatgaagatttgccttttgacttgcgtgtgttaactcagaaaaatctgcaacacaactgggaaacaacaggtgttctgggacgtattgctgcccctggtaaaatcatcaccaacattcatggcggtgggcgattggccacgtttgaagaactcgtactcccccatcttcaccaggatggcttcaaaaaacttcgcactgagctgtaccgcttaggtattcataccgctgtgcaattgcaaacatcatttccaagactcaaagagattggtattgatattgcgctagacgaagcagggcgtccctggattcttgaagtcaacacactgccaggcatttatgcctttggcttattaccggacaaggaggcgtaccggaagatcaaacgttatgcgattgcgtacggtcgtttgccctccaaaaagggtaagagctcccggccatcccctaaagcacaggcttcatctgccaaaaaacgtgtacgcagataacaaagggatatggagatctaagtatacgccttccctgttccataccttccctaatataaaaaaggcgccctctcaggcgcctcttcgaatatgttaaatgtcgaggtttttcacgtattttgcattttcttggataaagtcacgacgcggttcaacgttatcccccatcagggtgtcaaacatggtatcagcaagtatggcatcattaatcgatacttgcatcatggtccggctctccggatccatcgtcgtttcccacaattgtccggcattcatctctccaagacctttgtaacgctgaacgttgaatttcgcattttcgccgagcgttgcaataatttcatcgcgctctctctcggaaccggcataacgaatcactttgttacgctcaatcttgaacaatggcggttgtgcaatatatacataacctgcctcaatgattttacgcatgtaccgatacaggaatgtcagcaatagtgttcggatatgagcaccatcaacgtcggcatcggtcatcaaaatgattttgtgatagcgtgctttggcaatatcgaagtcatcaccaataccggtacccattgccgtaataattgctctaatctccgcattacccaatatccggtcgagacgagctttttccacgttcaaaatcttaccacgcagtggcaaaatcgcttggaaatgacgatcccgaccttgctttgctgatccgcctgcagagtcaccttcgacgatgtacaattcgctgattgaagcatccttggatgaacagtctgccagtttacctggaagtgagctcacttcgagtgcacctttacgacgtgtcagttcacgggctttacgggcagcttcacgcgcacgtgctgcttgcagacctttttccaaaatgcgacgggatacggaaggattctcttccaggaactcctgcagcttctcggcaaacaaggattcgacaatcccacgcacttcgctgttgcccagcttggtctttgtctgtccttcaaattgcggttccggaatcttgaccgaaataatagctgtcaagccttcacgcacgtcatctccggaaaggttccccgtgctgtccttgattacacccgccttacgagcatagtcgttgatgatccgtgtaagggcactcttgaaacctgattcgtgcgttccgccctcatgcgtgttgatattgttcgcgaaggaatagatattctcggtgtagttgtcattgtattgcagggcaacttccacctgaatgttatctctggaaccttcgacgtaaattggattctcatgcaggacttcgcgcttctggttcaggtaggagacgtattcgataatgccgccttcgtacatgaacgagttggttgcacctgtacgctcatccgtcaatgtaagaccgatgcccttgttcaggaatgccagctcacgaatccgggcaagcaagatgtcatattcgaacactcttgtttccgtgaaaatttcaggatctggatggaatctaaccgttgttcctgtttcgtcggttgtaccgatcactttcaggtcatactgtggagctccacggcgatattcctgttgatagatatgtccctcacgtttaaccgttacaaccactttttcagagagtgcattcacaacggacacaccaacaccatgcaaaccaccggatactttatatccgccgccgccaaattttccccctgcatggaggacagtcataactacctcaagtgcaggacgtttcattttggtatgttcgccgacaggaataccccgtccgttatcgactacagtcacgctattgtcttcatggatactgacctcaatgtggtcgcagtaacctgcaagcgcttcgtcaatactgttgtccactacttcccagaccagatgatgcaggcccttggaactggtggaaccgatatacatgcccggacgcttccgtacggcttccaatccttcaaggacctgaatttcattcgcatcatatgacggttgattcatagacatgcctttcacctacttctatagattcaatatcgtaaatatgcgttaactaattttatgccacacaacgctagagatccggaaaaatgtgagcccgctttttcagcgtggctgaggaaataggcgagtagtacacaatgtttttggtcaccacaatggactttgcttcctcttcgccgatgtgttccactgttttttcctgctcggcatgcgtgacatactgcttggagatctttgaggatttttcaatcgatatatcaaaaatagcgaccaattcggaagaacggatgatcttctcaccgcccagatgaatgtacataagcccctcactccttagcgttcaacctgtccggcatgaacgtgataaatactggcatctttgagcttgtcaacgttcaggctctcgatccccgtagccgtaataaaggtttgcaccttgctctggaacgtttcgatcagctgcgtctggcgaaaagggtccagctcggacagaacatcatccagcaacagaactggatattctccgatttcttcatgaatcagttcaatttccgcaagtttaagggacaacgccgttgtgcgctgctgcccctgcgagccatatgtttgtacttcccgatcgttaatgaaaaaggacaggtcatcccgatgcggcccactaagggttgtgcctcggcgaatctcctgctctttcatttgtgataattttatcataaattggtccattaagacagcttcatcttcctcagcggcttcgctgaaggaaggaaggtaggccagccgcaagacttctccgcctccggtgatcccctgatgaatcgtttctgcccacttttgcagtttctttatgaattgtttcctttttttgacgattttaacaccatgctcgaccagttgttcgttccacacctcaagcatggtctgggccgatgccccttttccccataactgcttaagcaaattatttcgttggacgagcactttttggtattgctgcaggtggtacaggtagccaggtgcaacctgtccaatctccatgtcaagaaaccggcggcggacccccggtgtgccttttacaatttccagatcctccggtgcaaacatcaccacattgagcgctccgacaaaatcacttaacttgcgctgctccaggccgttaatctttgcttttttgccttgttgcgacaaagatagttcaagcttgaccgatccgtactttttgtcgacctctgctgcaagtctggcacgttcctcaccgaaacggattaactccttatcacgggatgtacggtggctcttggtgagtgcaagtacaaaaatcgcctctgcaagattggtcttgccttgggcattttgcccgatcaacaagtttacgggaccaaaagaatccagtctcagatgttcataattgcggaaattctgcagatcaatgctgttcacaaacacgcggtaacctcccttttatcccgtccgtcaggaggcagcaggatcgaactggtcttcttattctgcagcaacttcgaatgtgccttctccgtccacttcaacgatatccccagggtataacttacgtccccggcgttcctcaggctctttattcacacgtacaagtccttcctgaagcagagctttggccatacctccagttgggatgcaatcagccagtttcaaaaattgatcaagcttaatatattccgtacgaatcgtaacttggttcactatgatcttcctttcgttagttggtcgtccgatatggcaatatcacgtaaaggctgtgactgtcatccagcggtttcaagataattggactcatgactcctgtaaaagcaatcatcagctgctcactttcaacaactttcagcacatccagcatgtatttggagttgaacgagatttttaacggatctcctgtaaactcggcaggttcgatttcttctcttactttacctagctcggaagagcttgaagaaatttcaacggatcctgaatccatcgtttgcatacgcacgatgtttgttttctcttcacgcgacagcaaataagcccggtcaatggattcacttaatttttttgtatctaaaacaagttctgttttgtatgacgttggaataattctagaagtatccggatatgttccgtccaaaatacgagagtagaacaatacacggtcgattttgaacaggacctggttatctgcaacaacgatatccacaagggtattttgatccggaacaattttgctgagctcgttcagcgttttaccggaaatgaccacgttgttaaagcggataccttctgcattatccagcattgctgatcgagtagcaagacggtgacggtctgttgccacaaatttcaattcgttgtcacccaaactccagagtacacctgtcaggattggagtagtctcatgtgtggaaatggagaagaccgtttgtttgatcatatttttcagcaaatctcctggaatggagacggtttggttttcttcgatgcttggcagtaccgggaattcttccggatcaagacctaccagttgaatttcggtagcacctgcggagataaaggtgttgaagttctctttgacttccatgtgcacttcctgtgatggcagcttcttgatgatctccacaaaaaacttggccggcagaactacactgccgggttgatctacctgaactacgcttttatctccatcttcaagcgggatgaaggattgaatggatatatcggtgtcacttgctgtcaacgttacaccttgatgattcacgtcgaatttaataccgctcagaatcggaatcgtcgtacggctcgagatcgctttggatacttgctgtatggaatcgtttaagtagtttttcattatgctgattttcatggtttcactcctagctgattttttgggtgttggggtgttaaaaggtgtttttcgaaggccgaaggctaaactccgaaatggctattttggagatgatatctttaagatctttttagtaataatagtaataggggcactgaatatgtggataagtgggtataaacccgtacacccaagcctatccacatgtgtatacgttgtgcataggcttgggacttgttcaggttggattctttattttttcggttaagttgttgataactttatagagatcctgatcgattttaatcgcttgggatattttttcgtgcgcatgtatgacagtggtgtgatctcgtcctccgaatgcttccccaattttgggcagagaaaagtctgtcagttcacgagagagatacatggcaatctgtcttgggaaggcaactgccttggtccgtttccgtgctttgaaatcttcaagcttaaggctataatactcgccgaccttttgttggatgtcatgaatagtgatcattttgggacgactggaaggaatgatgtccttcagtgcttcagctgccagatgagtggttacatcttgattagtcagcgaagaataagcaacgacccgaatcagggcaccttccagttcacggatgttggtgtcaatctggttggcaatgtacatcatcgcttcattcggaatatccaggttttccgcacgtgcctttttacgcaaaattgcgatccttgtctccaaatctggaggctgaatatccgtgattaacccccattcaaagcgagaacgaagccgttcttccagtgtcggaatttccttcggtggtctgtcgctggagatgataatctgcttccgttcctcatgcagcgcattaaacgtatggaaaaattcctcttgtgttgattcttttcccgccaagaactgaatatcatcaatgagcaaaatgtcgacgctccggtatttgttacggaagctctccccgcggttgtcacggatcgagttaatgaattcgttcgtgaatttctcagacgacaaataaacgactttgctgcccggatcatgctccagaacataatgtccgatcgcatgcatcaagtgagttttaccgagacctactcctccatacaaaaagagaggattgtaagctttggcgggcgcttcagcgaccgccagcgatgcggcatgggcaaaacggttgcccggcccgatgacaaatgtatcgaacgtatatttcggattcagcatgctgagtacggcttcttcctgtacaactgtaggcgttggcgccggcagttgcgggtccggttcagcaggcttgttctcttcgatgacaaatttcacatcgacttgcttgccaagcaactcgtataccgtcgagccaaccaatttggtgtaacggctctccagccattcgacggcaaacgtggttggtgcggaaatgacgattgaacggtcattcagcttggtggctttggttgctttgaaccaggtgtcaaagctgggtttgctaagtttgttttgtatgattgataaaatttgctgccataaatcagaagtatggctgtccacagactgtcactccttttacatgttccaagtgtggcttaagccatgatgcagtgtcgaaatacgagatatattgttgaatttatccccaaacccccgcaggtcgaaaacaaaaaaagtatgaacaacggaaaattgttcacaactttatccacaggctgttgataatattatgggtcagatcacatattcacatccaaaagtaatacaatcatagcaaaagaaaccccgcatttcaacgtatcgcgtgattttatccacaaattcaataacttgtgtataatttttagtcacaacacaatatattgtttataaactgtttaattttcgacagaatgacccaaaaaccaaaaatgtcttatacacaggttatccgtcaaatgatgccaaattgtgtgtaaaagtattcttcgtttgtgaataacctgtctgtggataaccgtgaagtaaaaatggagcatgattgagatcggaaaaagagtgacctctcaccctcgtgtttttcttgccaatggggcgatggtgaaagcgacgaattcagtatctggatgggagacggagagggggagtaaactcatgcttttaattgaacaagatcagtggtgtattttctaagtagatggtaattctgtgatgacagtgtataaggataatggacatagatgacttcattttgagacatatgtaatgagaattatcaggatcaagaggtaagctgatgctcgaatatggaggttgaagtgtatgaatgtataatatgaaatcaaaggatagattatgcgtgtatagcaaaagagggtgtcctctaaaaccgatttttggttttagaggacaccctctttttttggtgcagggacgaagtatggattgatgatttagagacggggaagggacatcttacgctggaattcagcgatatctgcgtattcctcttccagtttgcgagagatccgaataaagatgggcagcagctcttggtagagtacagcattctctttgacaggggtatgtcgatgcgttgtaccgaccatggaagaaacggcatgaagcgattggatccgccctgtagcgtacaaaccaagcacgacggcacccagacaggaactttcgaagctctcgggtacaaccacttcctgattgaagatatcagacatcatctggcgccagagaggagagcgtgcaaacccaccggtggcttgaatggaggtaggttgcccaatctgttcttccatggcgagcagtaccgtatataggttgaaaataaccccttccaggacagcacgaatcatatgctctttctggtgatggagtgttaagccaaaaaaggagccacgggcatccggattccataaaggggcacgttcgcccgaaaggtacggatggaacagaagcccttccgatcccggccggacacgttcggcaattttggtcagtacatcataggaattgatgccaagtcgtttcgctgtctccacttcagacgcggcgaattcatcccgcacccaacgaaacagcatgccaccgttattcacaggtccaccaatgacccaaagattctctgtgagggcataacagaaggttcgacctttgggatcggtaaccggacggtccacgacagtgcgaatggccccgctggttccgatggttgctgcgacaacaccaggttcaatggcattcacgccgagattggataaaaccccatcacttgcgccaataacaaagggcgtggagggggagagggccattttttcagccgattcgtgattcattccttctaatatatgtgttgtaggtacaagcttcgagagatggtcgggtgtaatgcctgcaacctcaagggcctctgcgtcccagtccagttgttccagattgagcaaacctgtgcaggaagcgatggaatggtcgacgacatattgtccgaatagacggaagaacagatattctttaatcgaaatgaatttggcggtgtgctcaaaaagttcaggttcatcgtggcgtagccacattaatttggtcagcggtgacatgggatggatcggtgtacctgtgcgcaggtagatgcgatggcccaatccattctcttgcagcttggcagaccaagctgcacttcgattatccgcccaggtgatgcaacgggttaagggtttattatcctgtcctatggcaatgacactatgcatggccgagctacaggatacaaacaggatcttctcggcagcaacaccactctgatccatgactcctcgtacagagcggagggccgcttgtacaatctcttcagggtcctgctcggcaacatcgggtgccggggtatacaaagggtattcctgcgttgaggtactgacgacagagccctgctcggtaaataatacggatttggtactggtggtaccaatatcgatcccaatcatatagttgttcatgtatttaatccttctttcttcagaaagcgataagattttaatttctttctactatagatactccatttataccactgtactcaggagcaaaataaagatcagtcccactacagataatagtgtttccataacggtccacgttttcaatgtctgggaaacgctcatattgaagaattctttgatcatccagaatcctgcatcgtttacatgagacaagatgagtgaccccgcacctgtggcgagtacaaccagctcaatattggcccctggtgtgagtgaaagcactggagcgacaataccggcggctgttgtcatggctacggttgctgaaccggtagctacacgaatgagcccagcgacaagccaggcaaacaggatcacgttgatgttggcatgggtagcgacttcagcaatggcgttacctacaccactattgatcaatacctgtttgaaggcaccgcctccgccaataatgagaatgatggtcgccgtaggcgccagacattcactggtgaagcgggaaatatcgtgtttggtgaatccacgtgcaaagccgagtgaaaagagggcaaatacaactgaaatgagcaaagcaatgatctcatgaccgataaattcactgaaaacggtgaaaccgctcgtggcatttgggtcaatgatgcttgctatggaaccaatcagcatcaaaataaccggcagcaatatggtaaacagggtaataccaaacccaggcatgttgctgtttgttttggttgcgaattgttcagccagttctgctggcggttcggtgtgtattcttttaccaataaatttaccaaacaaaggacctgcaataatcgctgtaggaataccaacaataagggagtacaaaatggttttacccaggtctgcgctgaaagcttcaattgctatcattggcgctggatggggtggaaccaaaccgtgtacagtcgacagacccgccaggatgggaataccaatctgcaacaaagacatgttggttttacgtgcaacggtaaaaatgatagggatcatcaaaatcacgccaacttcgaagaaaacgggaatacccacgataaatccaacaatcatcatggcccagtgcacacgtttcacaccgaaccgatcaaccaatgtagttgcaatgcgctcggcaccgccagattcggccatcatcttaccaagcattgtaccgagagcaataacaattgcaatggttccaagtgtgccgccaagtcccccggtaatggaagagatcacatcggcaggtttcatgcctgtaagcaaaccgagcattaatgcggacaacagcagggtgataaagggattccatttatacttggagatcaaaacgatcagaaaaacgatcgcaattaacgtccaaaccaataatgttgcgttgtgggatagtccaaaaagagtgctcatgatgttgtgtgctcctttatttctgatatagaacgcttacaagtgaaattagcgtcaacaattaaagttgtaccagtactacagaaggtgttggcgaaaaatgtagttttatcatgcccaaatttgaaacaaaatcgcattttgtatacttgtcgacaagttaagccgcaatcattcacgacggatatgattgcaaacgccttgcatcgattaagaatcaaagctttcgtgcagggtttttccagaatcttggaaatacgtgcggactccagcctgaatgagcaccttgtcacctgattcaagtgcttcaacgagcaaaaggtgtttctcaattacagcgcttactttctgctcgccttgaacaaatactctgcgcgttgtaagcagcataacagtcatcacaacatatcgaatactcttccatagatgtgaaatacgggaatgctgagcagcttcaatgatggtctcgtggaaaacgagatcctgatacgcgaattcgacggcgtcctgatgccgtccagcaagttgcattttgtcgatcacgttacgcaattgggtgattaatgattctgggacatcaccagcgagtcgctgctgcacaaaactttcaatcaggaaacggacatcatacaattcttcgacatccttgattcgtagtccaatgacaacgacacccatacgttcaagtcgaataagtccttcattggacaatgttcgtaacgcttcacggacaggtgaacgactgctgtcaaaatcagccgcaattcggttttccgacaaaatctctccaggtcgtagggtaccgctgatgatccgcagccttaattcgcaggcaatggcttcaccgcgggaagccccttgaagccaggaagaaggaaataacatatggctaacgctcctattaataagtaatcagttcattactgatcatagcataactattttgcggactggacattcagttcaatccatagtctgtagctacaagctaacggctacttttttttcaaaggactacttgtatacaagatgtgatttttatcctacacctttctcaaaagcttgtaaaccttaattgaagcggatacaacgggattagaatttgacgatattaatagcctataatcattatccacatgtgaataacttcaaacaggatgaaatgaaggagataacaggtattggagggtgtggataactacaaacgctgaaatagggtgatctgatcagggtctggggataactttcaggactctcttcggggcttgaaattggtaataaagtgaacggactgtggtcattactattggtgggatgaagagtgtatataaaagagggagaagccttgcgccttgcagttgacttttccaggtgatcatggttaaatatataaaggtgttttctgtgaagatgaaagtgattcatcacataagtatttccttgtgaggaggtgcaatacattgagacctacattcaaaccgaacgttagcaaacgtaaaaaagttcatggtttccggaaaagaatgagcacgagcaacggccgtaaaattttggccgcacgtcgccttaaaggccgtaaaaacctgagtgcttaatgcattgaagaccaccgaggtggtcttttttttcttaattagctcaaatcagactggatgctgctacagatcaggtctgaatggtctgcgaaaaagtgctgaacacacacgatgtatgttgagtgagttttccatttttcgaaaacttaccttatataatgatgaaccgttgataggttgaaatggccaatcaacattcatcccggatgaatgcggatcagttcaagtagctgattaacaatcatcccaaatgaagttgtcgccaaggcggtttaccgtcattcaagaaagcctatactaaatcagtaatgaggcctccgtcaataacattggtggagaacagcaaggagaagcgccgtgtataaaagactgcgtctacgaaaccgggcggactttagccgtgtataccggtatgggaaatcgtttgccaatcatcaattcgtggtgtatggttgtcgccgtaaagatacggaacaatttcgggtcggcgtatcatgcagcaagaaaatcggaaacgctgtcgtacgcaaccggatgagacgcatgatcaaggaaattgttcgccatcatgagcatgagatcgtcacgcagatggatctgatttttatcgtcagaaaaggtgcactggacatgccctataaggaaatggaaaaaagcctgctacacgcgatgcgtaagggctctcttttgaagtcgagcaagcggtaagcttcggtttatttgtcctcctaattatggtatgattttacgatggaatggattggttaagagaggggttatgaagtgtcgcgattgaagacatcaaaggggaagtggattctcctcattgcagtcattgcaatggtcactgtactcgccggatgtactccacaaggagccggggttactacggaagatctgaagaatagtgattctttttggcaagctaatgttatttactggttctcactggcgctcgatactttcgccaactggttcaacggtgagtatggactggccgtcctcgtgatggtgcttattgtacggacattgattttaccattaacaatgaaacaagtccgtagctccaaagctatgcaggcgattcagccgcagctgaaggagattcaagccaagtttaaagatacacctgagaaagttcagcaagaaacgatgaagttgttccaggagaacaaagttaatccgatggccggttgtctgccacttatcattcagatgccgatttacatcgcactttataactcaatttacggaaactccagtctgagaacgcatgatttcttgtggctccagctcggatcacccgatcacctgtttattttgccagtgctggctgccatcacaacattcattcaaacatggatgatgatgcgtatgaaccctgcacagcaagtgggtccgatgcagtttatgctgtgggtgtacccgattttgatcttcgtgatgtcttatcagttcccgtcagcacttccgctgtactggttctacagtaacatctacacgatcgtgcaaaactatttcctttaccggaataatgataaaatcgtggctgaggtcaacgtgaagcagaatagctcttccaaaaatggagctaaacgcaaaaacggtggcaaagcgaccgtctctggaaaagggtcgaaaggggccaaaaaatcgaaatgaccaaagtcattacgtcaggaaaaaccgttgaagatgctgtaaaccaaggattgaccgagcttggcgtaagtcgggacaaggtcgagatacaagtgttagagcagccgtcaaaaggattcctgggtttgttcggggtgagggcggccaaagttgaagtgaaattattgcctgtaccggaagttgttccacagccgatcaaaccagctgcatacaaatctgaagtagatgcattactcgaggatgttgcagctaaaaatccctatgaagaagcggctgctttcttgaaagaggtcgcagcaggtatgggactggatgttgaagtgcatatcaaaaaacagcgggatggacatatcttcaatattgccggcgaagatctgggcatgattattggcagacgtggacagacgctggatgcgcttcagtatctaacgaacattgtagcgaaccgatattcggaaagcttcgttcgaattgtgcttgacgcggagaatttccgtcaacgtcggcggaagacactggaggatctggctgaacggttggctggacaagcaatccgtaccggtaaggaagttgtactggaaccaatgcctccgctcgaacgaaaagtcatccatgcaaaactgcaaaatcacccgcagattaagacgttaagtaagggcgaggagcctaatcggcgtgtggttattacgacgaaataacacgaaattgaagacgcaatggcttcctgcccggtgcagaagccattgcttttttcgtacagaagcaatttgataaggtgcgtagaacaagtaaagagtgaacttaatacgataagcagcatgtcatattttatatcattaatagatttgaaaatggatatggcgtcccccagagggacggcaatttaaaatagagcaaggagagataactatgatcagtgatacgatcacagcgatatcaacggctgtcggagaggcgggtatcgccgtgatccgggtcagcggcccggaagcagtgtcggagacggaaaagatttttcgcagcaaaacccctttaactcaggcagcatctcacacggttcattatggtcatatcatagatcccgttaatggggaaaagattgaggaagtattggttacggtcatgcgagcaccacgctcgttcacaacagaagatgtggtggagatcagtgcgcatggcggtgtagtgtctgttaaacgggtcatggacctgttgttgcagcttgatattcgtctggctgaacccggtgagttcacgaagcgtgctttccttaatgggcggattgacctgtctcaggcggaaggtgtcatggatcttattcgttccaagtcggaccgagctttctcggttgcattgaaacaggttgaaggcaagttgtcctccaaattgcgtgatctacgatatacattggtggaaacactggctcatattgaagtgaatatcgattatcccgagcatgatgtggagtcgttaacgtctgattttattaaagaaaagtccagtcaggttatgactgaaattgataaattgctgactacagcagagcaaggtaagatcctgcgagaaggtatcacgacggctatcgttggacgacctaacgtaggtaaatcctcattgatgaatacacttgcgcaagacaaccgggccatcgtcacggacattccaggaacaactcgtgatgtgatcgaggagttcattacgatcaataatatcccgctcaagttgcttgatacggcaggaatacgggaaacgatggacgttgttgagaaaatcggggtagaacgctctcgttctgcggtaagtgaagctgatctgatcttgatggttctgaatgctgcggagccacttcatcccgatgagattgaattattggaacaaatccgcggtagacaatcgataatcattatgaataaaatggacttaacgccacaggtagaacgtgacgtgctgcttcgttacattccggaagaacggcttgtaccgatgtcggtgaaagatgatctgggtgtggatcgactggaagatgccatctctacgctattcttcagtggtaaactggagtccgcagatctgacctatgtcagtaatgtgcgtcatattgctttgctcaaaaaagcgaagcagtctctggtggatgcctatgaagcagcagagcagttcattccgatcgatatgatacagattgatgttcgtttggcgtgggagcatttgggcgagattgttggagatacagcacatgatgcattaattgatcagattttctcccagttctgtctaggaaagtaaaaataatatactgccgattgagttaaatcgtagtgtatgatggagaggtacaatttctgcctgttgtcaaaggatagaatgatattgtagccattacgtgttggtttcatatagatagggatgcaagttccgatgaacggttagaagtagtttcattattttagaacatgatccgtctgcgtgagttacaccaaatgcagcggaataaggaggtaaacgggaatggcttttgatggcggcagttatgatgtaatcgtcgttggtgcagggcatgctggtgtggaatccgcgctggccgcagctcgtatggggtccaaaacactaatgattacgatcaatctggatatggtggcctttatgccttgtaacccatctattgggggaccggctaaaggacatgttgtccgtgagattgatgcacttggtggagaaatgggacggaatatcgataaaacctttattcagatgcggatgcttaacacgggtaaagggcctgctgttcacgcgcttcgtgctcaggcagataaattctcctaccagcataaaatgaaggaaacaatggagaatgaacgtaatctgacgatgcgtcagggtatggttgattcactgatcgttgaagatggaaaatgtgtaggcgttgtgactcagaccggaacagagtatcgggctaaagcggtcgttctgacaacaggcacatacttgcgcggtaaagtaattatgggcgagttgatgtatgagagtggaccgaacaatcaacaaccctctcttaaattgtcagagaatctgcgtgaactgggctttgatctggttcgtttcaaaacgggtacaccaccacgtgtgcataaggatacgattgattttagcaaaaccgaaattcagcctggcgatgacaagccgaagttcttctcctatgaaacagaatcttctgataatgagcagttgccttgctggttgacgtatacatctgtggatacacatcagattattaatgataatctgcatcgtgctccgatgttctcggggcttattgaaggaaccggaccacgttattgcccttccattgaagataaaattgttcgtttcagcgacaagccgaaacatcagatattccttgagccggaaggcaagaacacatccgagtattacgtacaggggttgtctacgagtatgccagaagacgttcaactggctatgctgcgttccattccaggtatggaaaaagtggaaatgatgcgtaatggttatgcgattgaatacgatgcgatggttcctacacaattgtggccatcactggaaactaaacgtctaccaggtctgtttacggcgggtcagattaatggtacctccggctatgaagaagcagcaggacaaggtgttatggctggaatcaacgctgcactcaaagtacaggggaaagagccggtaatacttgatcgttcccaaggttatattggcgtgctgattgatgatctggtgacaaaaggtacaaatgaaccgtatcgtctgttgacttcacgcgctgagtatcgtctgttgcttcgccatgataatgcagatatgcgtttgacggaaatcggacatgacattggcctgatccctgaagagcgttatgcgaaattcctggataaaaaggcgaaagtcgagcaggaagtcgcacgtctgaaagtggctaaagctcgcccggttgaagtgaatgccaagctggaagagtacggatctacacctattcaggatggcagtacgttgcttaccttgctgcgtcgcccggagctggggtatgaactgattgaacagctctcaccatctgaggtagaactgacagcagatatgaaagaacaagtggaaatacaaattaaatatgcgggttatattgagaaacaattgatccacgtggaacgtttgcaaaagatggagaaaaagaaaattccggacaccatcgtatatgatgagattcatggtcttgctatggaagccaaacagaagctcgctacgattcgtccaatctcgattggccaggcttctcgtattgctggagttactcctgccgacatctccattctgctggtctacctggagcattataaccgtgtaaccgcagcaaggggacaataatggacgatattcaacagcaactgcagcggcgcttaaagaaacatggattagagctgggcgaactccagttggagcaattcgaactgtattatcaggaactggtatcctggaatgaaaagatgaatctgaccggaattacggatcgtgagcaagtgtatacaaaacatttctatgattcggtatcgctggcattttatactgacatgaccaaagtgaataagcttgctgacattggatcaggagcgggttttccgggattgccactgaagatctgtttcccgcatattaagcttacgatcattgattcattaaataaacggattggctttctacagcatgtggtagatatccttggcctgactgatgtggaattggtccatggacgtgctgaagagattggacgcaaagaagggtatcgtgacagctacgatcttgttacggcgcgtgcagtagccaagctggctgtgctgaatgaattctgccttccgtttgttcgtaaaagtggaatattcgctgccatgaagggtggagacccgcgtgaagaaatgaaggaagcggagttcagcttcaatcagctgaaaggacgggttaaggccgttcatcctttccagctgccggttgaagaatcagagcgtcacatcattctgattcagaaatttgataagacaccatataagtatccgcgtaaaccaggtactccaatgaagactccgctgatatagttgcgtgatggttttgaagtaagtcaaaacaaaatagaattttagacatggatgaagaggatgtttcacgtgaaacattctcttttttttgttttctaaaatggaggactggatcaacattacagatacttcgtattacatatcttttaaagaacctgtattgatgaattttacgcacagtaactcatgaacaatttcattaattgaatgtgtgcaagtcgtcatatttccaatattcacaaagaaaaagcaggataattagtagagtttaaagaataggtaagcataggattatgatagaaaagatgatagaatagaagtatccgatcctgggtcacagcgatcatagattatatgtatagatagatggatatgcgttcgatgttgcatgacagaaagcgttatgaaaggcaaaacttattccaagaacgatgcatgtgaaaggtcgcttattgaataagaagcacctgcaaagactgtgggagctattacgaaactaggtggtaatctgcggaatgaaagaacaattttcgaagttgtttggtttggcggagcgcaataacggagatgagatcaaacagattccggttaatgaaattgtgagcagcccatatcaaccccgtactatttttgatgatgataaaattgatgagttgttgcagacgatcaaaacacatggtgtaattcagcctattgtcgttcgcgtgcgaaatggatcatatgagattattgccggggaacgtcgctggcgtgcagttcgaaaattgggtttggatacgattccggctattgtgcgtgaattcaacgactctcaggccgcatccattgcactgattgagaacttgcagcgtgaaggattgacttccattgaggaagctgtcgcttatcagaagctgatcgacttgcatcaattgacacaagaaagtctggcacaacgactcggcaaaagccagtcaaccatcgcgaacaaaattcggttgttacagctcccggacggcattaaggccgcattgatggaacgcaaaatttctgaacggcatgcaagagcattactttctctggatacggaagaactgcagatgaagttgctcggtgagattatcgaaaaagaattgaatgtgaaacagacagaggcacgtgttgccttctacaaggaatcttccaagattaaaaaatctagacgtgtttcctttaccaaggatgtaaggcttgcacttaatacaattcgccaatccattgatatggtaactggctctggtctggacatcaaaacaaaagaagcagaccatgaggatcattatgagatcgttatccatattccaaaacgcaaataattgaagcttatggcggcaatgggccgctttttatgtctataaagcaagttaggtcagacatttttaaagaacggtatattgatggaacggtagttgttgtttgtgtggacgatagccgcctgctttttgttaacaatatctcacaacctacagaaaagactcctattttatttgaggtgaagtaattgtctaagattatggccgtagcaaatcaaaagggcggtgtggggaaaacgacgacatctgttaacttgggtgcaggactggcttcactcgggaaaagagtattgcttgtcgatattgaccctcaggggaatacaaccagcggagtcggaatcaataaagcagatgtggctaattgtatatatgatgtcattattaatgaggttcctcctcaagaagcaattttggagactcagattgaaggccttcatatcatacctgcaacgattcagcttgccggagccgagatcgaattggtgtccacgatatcacgggaagttcgcctgaaaaaatcactcgccatggtgaaaaaaaactatgattacatactgatcgattgtccaccatctcttggtatgttaacgatcaattcgttgactgcttccgattcggtgatcattccgattcagtgtgagtattatgcacttgaaggattaagtcagttgctcaatacggttcgtctggtacagaaacatctgaatacatccctgcagattgaaggggtattgctgacgatgtttgatgcgcggaccaatctgggaattcaggttattgaagaagtgaaaaagtattttcaacaaaaagtatatcaaacgattattccgcgtaacgtacggcttagtgaagcaccatctcatggtcaatccattatcacgtatgaccctcgttcaagaggggcggaagtgtatttagagctcgcaaaggaagtgatttcttatgagtaagcggcttggaaaaggtcttgatgccctcattccttcgctttcaattaatgacgatgataaagtcgtagaaatcccgattagtcaactgcgggctaacccctatcaaccacgtaaagtatttgatgagggcgcaatacatgaactggctgagtccattcgtcagcatggtgtcatacaacccattattgttcgtcctgtattacgaggttatgagattattgccggagaacgacggttcagagcttcgcaatattgtggtaatgccacggtaccggctgtagtccgcaacttcagtgatcagcaggtaatggagattgcgttgatcgagaacctgcaacgggagaatctgaacgccatggaagttgcagttgcttatcaggggttaatggatcaattcgcgttgactcaggaagagttgtctgtaaaagtaggtaaatcacgttctcacattgctaacttcttgcgtctgttatcattgcccgaagaagtaaaagaccatgtttcacgtggaacattatctatgggacatgcacgtgcgatcgtgggtgttaaagacgaggttatagtgaagcaacttgcgaaacagaccattgatcagcaatggagtgtacgtgagttggaggaagctgttcaacaactggatcgctccaaaacaggtgaggctaaagccaaatcgaagttaaaaaagaaagatccattcattgatacattggaagaatctcttcgtgaacgtttcaaaaccacagtgaaaatcaagcacaataaagataaaggtaaaattgagctcaactactacagtcaacaggatctggaacggctattggaattgttacaataacagtcgggtctatgattcattaacaacatgcggggcttactcatgtcatgacatatcgcctctgtaccatggagaaacgatatgtcattctttgtttatagggttatatgtgcaatacgtgcaggcgaattattaatttatgggacagaggtggttgtgaggtggagggagttatctatctagatcatgcagcaacatcttggcccaaaccacctgctgtcggtgatgcgatgttgagtgcattggagattgccggagccaatcctggcagaggaagtcaccgcatggctgttcaggcaagtcgtgtattgtttgaggcgagaaaatctttatccgatatttttggaatcaaaaatgcgaatgatattgcattcggatcaaatacgacagaagcactgaatctggcgattcaaggctcgctcagagagggcgaccatgtgattgccaccatggctgaacacaactcagtcagacgaccactagagtatatgcgcagactccgaaatgtggagattgattatgtacctgttgatgctgcgggagccattgatctgatgcaaatggaacgtatgtttcgctccaataccagattggtggtatgtacacatagttcgaatctgcttggcagtattcttcctattggagaaatttcgctcctgtgtcgtaaacatcaggcgatcttattggtagatgcagcgcagagtgctggggttatgcctgtgaatgtacaacaattgggcattgatatgttggcttttccagggcataagggactgcttggtcctcagggtacagggggcttgtacattgctccagagctcgatatagagcctttacttcatggaggaacaggaagtcagtcagaagctctagagcagccaaaggtgcgtcctgatcggtatgaggcggggacgccgaatacagtcgggatcgcagggctgaatgcgggtgtgaaacatgtacttgagatgacaccagcggtcatctaccaacatgagtgggaactgacccaacttatgatggatgggttgtcatccgttaagggtatacgaatgcttggtccagagattggacagccacgcactggattagtatcttttactgtagatgggtatgattcagcacaactcgccttccgtttagatcggaattatgggattgcggttcgctccggttttcattgcacaccccttgcacacgaatctgctggtacaaccgctaccggagcagtaagggccagtgtgggatacaattcaactagagaacatgtggaagcactcgttaaggcagtgttggaattgactggagcagactagattagagttgaaatgatgaactcatttgatacagggttgcttgattaagcttatggatatcgggttgatttataatgaatgataatattacaggacagacgttaatctgatcaaaaatatagaggggtagttgcaattacatggctgaattaaacgagctgattctggaacagctgttatggattattggcggaatggcattacttacggtgatcttgctgattgtgagtattgttcaaggggcaaagttacgaaagtttaaacgtaaatatgaagccatgatggctggcagtggagtagaggacctggaatcgttgctggttaatctgaaaattcagatggacagcattgaggatgaacacaaactgcaaacgaatcagctgcaagttgtcatgcaaaagctgacccgcattcaaggtaaagttggcgtgaaaaggtacaatgcatatggagagcgtggcagtgatctgagcttctcaatggccatgattaacgatagccaggatggcatgatccttacggggatatataaccgtgacggttcttatgtatatgccaaacctcttaaagggggagagtccacgtatactctgtccccagaggaaaaggaagctattaatctggcacagcaagcagagtagaacgtgtatgccattcccgaatggccgagtatagactgctggaaataatctcggacatgcgcataacaagactgagccgtgtgttctgtagaacaaagtattccataaagccgccgacgttaacgatacctgtcagatggatatcgccgaccggcggtaattctttatttacccccgcacccggcttgagtggaccattcacaacttgaatgcatcccacactggatgattgtccgagacaggcatcaatgccaatcacataagggttatggtgtgttttctgtatgttgtggagtgtatcttgcaggttcatcgcatgaactggttcatccaaggtaccatatagatggaataaagggctgtcccacttggaaagggctgatccgaccagaggaccaaggcagtcgcctgttgagcgatctgtgccgatgcagacaatcactacattttgcagagaatgggctttatagagatggaacattaaacgatgggtaatggctgagtgaatacctggatcggtatgggggattttcaaactggtcatgtcttgtgatgaaaaggaacgcgaagtaggattcataggatctatcctttcccttggaatagtagtaacagtatatggaaaggtagagcgttttatacttcacgaggacaagctttttctctagggttgaacgtatggcgaaaggagccggatatggacgaatggattaacgattggatgctgattgcgtttgattcaacccagcaggcactgcgtgctgaaatgctgctggagtttgctgagatagagattgatttgttccctacaccaaaagaaattacagcagggtgtgcgctatgtattcagtttccaaaagaggatctggagcgagtgcagaagatcattcgtaacgagttcgtagagatccgaggcctctatttcaaaacagaagacagctatgataacataccgatgtagaggagggatgatgaatgttgtcatttcagtttgctcaagggactacagctagcggttcggtagccgccgtggatgaagcccttcgttggacggataaagtctggaacaaaattgcagatccagaaatgtggcttaacattatgttcagctcaatccggatcatcattatttttatcatcacccgtattgtcattaaggtagtctatcgaattatagatcgttccatggaacgcaagcaggaaggcaagattcgcgtgaatccgcgcaggttcgtaaccgtaggggaactgttgaaaaatgcaacctccataacatgtaatttcattatgattctgctactgttatctgagatcaatatccaagttggacctctactcgcgagtgctggtgtgctcgggcttgccattggttttggtgcacagggtctggtcaaggatgttattaccggtttcttcattatattggaggaccagttcgctgtgggggatgttattcagacgggaacctacaagggaacggttgaagtgatcggacttagaacaacgaaactggtcagctggcaaggcgaagtgcacattatcccaaacggggcgattgcaagtgtaacgaactactccatgtcgaattcgctggctgtagtggatattccgatgaaggcggacttaagtctcgatgagtcagtacatctggtgaaaaagtctttggttgggattgaagagcgtgacctaaatattgtgaaggtgccggatgtgctcggtatacagtcgatgtccacatcagagtatgtggtgcgaattgtggctgaatgtatgcctaactctcgtgcttcggtggaacgtcagattcagggcgatgtgaagaaaacgctggagtatcatgagatgagcaatcaagctgtattggaacaggcagtagctttggagaaagatgagggggatggcacaggtggagcgtaaaagtttccagcttggggatatcgtgcagatgaagaagcagcatccctgtggcagcaatgagatggagatcattcgtatgggtatggatattcggattaagtgtgtcggatgtaaacacagcgtgttgattccaagagcgaaattcgagaaaaacatgaagaaggtactgcgttcagccgaagattccactgaatcctgatcttgcaataattcggtatgcagtatgcataataacgtttacatgcaggctccgtaggagtgttgcgttctgtaaatgatcatgctataatcaatattgctgcggaaaggtacccaagaggcccaagggggctgactcgaaatcagttaggcgtgtcacagcgtgcgtgggttcgaatcccaccctttccgccacttcaaatgtaacttactcaatacacattgagtttaataaaaagatcgataagaagactttccattaggaaagtcttttttggtataacgttttattgaatatgtattgaaatgtatccatatcagatgcatcattaatgactcgaacgaaaaataaagagccccgaagggctctttatccggcggtgcatttgtttgttaggaaacaatcggtcgtaacaatcagacacttggtgtactgcacgtagcaatacgcgtgcttcagacgaagggccttactacacataaccacttgcttcttaaattacgtgatgaatctccaacagcgaatgatcggcttcgttgtccaacggaaccacacctctctcgtgcaccgcctgattgtattatgtgctttattccgttttatatacatcgatcgtcaaaaaattattgcgattaatggacgcgggctttggtcagcttcttccacttacgattttgattgcttgtttcggggaaagcttcacctttttgcagcgtaacacgctttgggttctgaatctccgtgacaaagcttttctccccaacttctgtgtattctccatcgtttggtgctttgtctcctggttcaaactcggttttttcacccatgataaaacctcctctgcaaattatgttactttgttacttctgtagtgtgctccatagccgggctgatcatgtgccaatatgtacagggaacgtttgcttgcactttgactcggtatttgttatattaatatagttcgagtttgtgctcgttccttgctctcaacctagattgagggccagagtccataaggaggtgaaaattatgcgcaaatatgaagtgatgtacattattcgtcctgacattgagcaagaagttgttcaagctacagtcgataaattccaaggcatcatctccaacggcggtggtgaagttacagctcacgacgttatgggtaaacgccgtcttgcgtatgagatcaagaaattccgtgatggtttttatgttctggtacatttcactgctgaaccagcagttgtaactgaacttgagcgtctcatgaagatttctgacgaagtaattcgttatctcattaccaacgacgttaagtctgcttaagactactcgtgattaacgcaccaatacgctctgaaggaggggattacattgttgaaccgtgtcattctgatcggacggttaacccgggatcctgagttgcgttacactccagcaggagtagcagttacgcaatttactttggcagtggacagaccgtttacaagccaagggggagaaaaggaagccgatttcattccggtcgtaacctggagacagcttgccgagacctgtgcgaactacttgcgcaaaggacgcctggctgcagtcgaaggacgcattcaagtacggaactacgagaataacgaaggaaaacgtgtatacgtgaccgaagtcattgccgataatgtccgtttcttggagtcagctaaccgtgataatagcggtggcggcggtgggcaaccaatgcgtgaagagccttcttatggaggcggcggacgcgcgaacaataacaataattcgcgtagcaacaatcaggatcctttttccgatgacggaaaaccgattgatatatcggatgatgatttgccattttaacatgaactgatactcttaggagatatgggttacatgataggaaaggactgaaaagcatgggcttcaagcaaagagaaggcggagacaacgataaaagaccggcacgtcgtggcggccgtaataaacgtcgtaaagtgtgcttcttcacagctaacaaaattactcacatcgattataaagatacggacttgcttcgtaaatttatcagcgaacgtggaaaaattttgccacgccgtgtaacaggtactagcgctaaatatcaacgcatgctgacgattgcaatcaaacgctcccgtcaaatcgcattattgccatacacaactgagtagtttttactcagcttgcatacgaagcagtcggcttatagccggctgcttttttgtatatatcaatagaattattagaaataacagatccactctaacaaatggaagaattcaatactgtggtgatagaagcattcaaggctcaaatgaattataatagagtctaatctactgaaaaggttcaggcagcaggaatagctgtttatttcagaataaacaccaggagtggatatgaatacatcaaaacgtaaaggcaaacagagaaaaaagagaagtctaaaaacctggattatagctactcttttactttccattatatatgtatggttacagcaaaaaggtgatatagataatatgtggcctgggacaacaatccaagaagctctgccaatcaccggcctacatcctgtggtagcagagaatgagaaattattggtacgtaaggcagcgagacgtggaatagagattgttatcacccacggttaccgaagttccgaggagcaagatgcactattcaaccaaggacgctcaagcgcaggcaatatcgttactaatgcacgtggtggtgagtcatatcataactacggattagcaattgattttgcattgaggacgcctgagggtgatgtggtgtgggatatggaacgggatgataacggcaatggcaaggcagactggatggaagttgtggatctcgccaaagagttaggtttcacttggggtggagattgggcaaactttccggactatcctcacttgcagatggattttggtttgagtattaatgagttaaaacgtggtaaaagacctcctgactctcagtaaaaggtgttatatatacacttaaatgaataattattagataagctctgcattttgcagggcttttttctttcttttgtaaaataaatgataaaagatgacaatttggtctttacattagcaaataaataaaactatactagattaactagattttttactctgatcgcacatattatttcaattgtaagcataacggctccggttcaataaaatttggctatagatcgagatataatcatcactcatatatgtaacatttacctcacgcaaaattaagattgtctacttaatttaaagcatacacatacactagatgtaactattatgttatgtatatgttattttgaccaattgcctatgtatacctcacagccaaaaacaagataacgcctctcaaattccctgctataagcctttatagtattactaatatccaaatctgtagtataaaaaacatttataccaaaaatctcaaaataagcattgacgttagctaaaattacacgtatgattacattaattattttgatatataattccgctaggaattatcaacattaattgaccaatggtctaaatataagtctcttaaacttgtttctcctaacaatttggtattttgtataagctattgttcgttatcttcaagaacttggaaatatacagtggatgcatttctacacacgaatacaatctacggaaattatggggttagggtgattgatttgaatacagagctattggaagtcagaaatctaacaacatcattcagaattgaagatgactattatgcagcagtggatcacgttaaccttacggtgaagaaaaatgaagtattggcgattgtaggtgaatccgggtcaggtaaaagtgcttttgcattctctcttatgggtttgcataacaaagcaaagatcgaaggccagattctctataaaggacaagatattgccaacatctccccaagcaagttaaacaagctacgcggcaaagaaatgggcatgatttttcaggacccattgtccgcactaaatcctctaatgattattggtgaacagattgaagagattctcacacttcatcagtccaagctgtcttccagagagaagagagaaaaggtcattcacttattgaatcaggtagggattccacgtcccgaacaaatatacaagcagtatccccacgaactatctggtggtatgagacagagaattgttattgccattgcgattgccaacaaaccggaattactcatagccgatgaaccaacgacggcgcttgacgttacgattcaactacagattctggagctgatccgtgatctgaagagtgaaattaacgcaggcattattctgattacacatgatctgggtgtcgttgctgagatggctgatcgcgtagcagttatgtatgcaggtgaaattgttgaaatcgcagatatcttcacattgatgaacgatgcgaagcatccatatacccgctcattgttgaactctattcccaccctgtctgaagaaagatccaaattacatgtcatccaaggcatcgtaccatcactcaaaaatcttcctcgcaaagggtgcagattcaaagcccgaattccatggattagtgaatcggctcatgaagagaacccacagatgcatgaaattgcaccaggtcactttgtacggtgtacctgttaccagcactttcatttccctgaccaaagctgaggaggaataacataatggcattactcgaagtagaagggcttaagatacactttccgattcgcggtggattgcttaaacgggaaattggcagtgtaaaggctgttgatgatgttagcttctccattgaagaaggacagacctatggtctggttggcgaatcaggttcaggaaaaacaacaacaggcagagccattattgggctaaaccatgtcactgacggaaagatcctgtttaacggcaaaaatctggctacggagcgacgtaagaacaggcagctccagcgggatgtacaaatgatttttcaagacccatattcatcactgaatccaaagaagcgggttatcgatattatcgctgagccgttccgtaactatgagcgtctgacagctaccgaggaaaaaagacaagtaagagaattacttgaaaaggttggcctgagtccggaatcaatctacaaatatccgcatgaattctccggcggacagcgtcaacggattggcattgcacgggctattgcactgaagccgaaactaattatcgcggatgaacctgtatctgcactcgatgtatcggtacaggctcaggtactcaacttcatgcaggaaattcaaaaagaattaaatttgacctatctgttcatcagtcacgatctgggcatcatccgtcatatgtgtgatcagattgggattatgtataaaggtcgatatgtggaacagggcacaacaaatgatatttttgagaatccgcaacacatctataccaaacgtctcattgcagccattccggatatggacccaaccaaacgagaggaaatggtagccttccgtcaacaggtcaaatccgagtatgaacattcataccgaaatttctttgatgaggaagggcttgcatactcgctcaaatccatttccgatactcaccgagtagctctacctcagaaaggttgaaggccatatgtggaaaacgatagtacgcagaattatcataatgatccctcagatctttttactaagtcttttggtctttctgatggccaaggccatgccgggcgacgcgctaaccggattgcttgatccaagcgttgatcccaaagcattggaagcgcagcgagagagactgggattgaataatccctggtacgtgcaatattgggactggatcaaaaacgccatccaaggtgattttgggcaatccttccgtttcaaaatgccggttacggacctgatcggtcagcgtgtagcaaacacattctggctcgcactggcgacacttgtactgacttacctgatcgctattccactgggtatcatcagtggtcgttacaacgatacctggtctgatcggttgatcacgggatacacttacctggggtttgccgcaccattgttcatctttgcactagtgatggtatggatcttcggattccacttcggctggttcccgacaggaggtagcgttgcgccgggtcttacaccaggcacattcagctacgtaatgagtaagttctatcatctattattgccggcattatccatggcactaattacaacggtatctaccgttcaatatttacgtagtgaaatcattgatatcaagcataaggaattcgttattactgccagagccaaaggcgcctcggaatcccggatctacaacaggcatatcttgaggaactcactattacctatcgccgcgttcttcggatatgagattacagggcttatcggaggtacggtatttattgaaagtatattcagttatccaggtatggggcagttgttcctgagttccatctcattgcgtgacttcagcgttgtgactgcactcgtattgttgtatggcgtagcttccattctcggggcattgctgtctgacataattctaggaattgtagatccacgtatacggatcaagtaagaacttgaagatttcggggtgaaaacaagatgagcaaggccaacgaggtagttgtaacttcacaaaaggttgataaaagcccctccagcttgagtattttatggagggagcttgtcagagataaggtggcactaatctcgctcattttcttgggcttggtcatgttgctggtatatggcacgtctctcattctgaatcaggatgatatcgtacgcgtggatctgtttgccttatatgaacctccatccgcgaaatattggcttggaacggactatggaggtcgtgatgtatttggccaactggtcatcggtacacgtaactccctgaccattggaattatcgtaacgttaatgactggcttcataggtatcttaattggccttttatccggttatttcggtggaatgatagacaacctgtttatgcgtgttgttgatttcttcatgatccttccgatgttgatgattgttatcgcgtttgttacggcagtaccgaaatacaatatcatctcgttctctctaatcatgacggcatttctctggatgggtatcgccaggttgattcgctccaaagcattacaggaacgggaactggattatgtaaaagcttcaaaaacattgggctcatctcatctgaagattatgctctcacaggttcttccgaatctgagttccattatcatcgtaacgatgacattgaatctcgctgccaacattggcctcgaatccgggctgtctttcctcgggtttggttttcccgaaagtacgcctagtcttggaacactcgtaagttatgcacgtaatccgcaaaccctggagtccagatggtggatatggctacccgcatcggtactgattctggtattgatgttgagtataaataatgtcggtcaagccctaaagcgtgcgactgatgcaagacaaagaagaggttaaaaaaagggaggaaaggttcatgaaaaagggattattttcacggggactatttttcacgatgatgttggtctttgtattggtgctcgcagcttgctctgagaaagaagcagctactccagctccagcttccaacacagaagagggaaaaacggaggaaaaacctgctaatgaagagggcgtttactccattgatgacttcaacaatgtcaaaacgaatgagggtactgcgatcgagggtggatcagttacattcggacttgtatcggatactgcttttgaaggtacactgaactttaacttctattccggtaacccggatgcacaggttcttcaatggtttgatgaaggtttgctgacttgggataaagactatgtgtacaccaatgatggtgctgcaacatatgagacttccgaagatggcaaaacgttcacactgaccattcgtgataatgtgaactggcatgatggcaaaccggtaacggctgaagatctgcagtttgcttatgaagtgattggtaacaaagcgtatgatggtccacgttatgactccaacttcactagtatagtaggtatggacgagtatcatgctggaaaagcaaaaacaatctctggtattaaagtgctgagcgacaaacaaatcagcattacgtataaagaatctactccgtccctgctgacaggtggcgtatggacgtatccactggctaaacatatcttcggcgatatggatgtagccaaaatgtcttcttccaaagaagtacgtgaaaaaccaattggttttggtccatttaaagtggatgttatcactccaggtgagtctgtaacttttgttaaaaacgatgactactggcgtggagctccaaaactggatggtgtaactctgaaagttatcaacccgacaacggttgttcaagaactgaaatctggcggagtagaccttgtggatgcattcccgacagatcaatacaaagacaatgctaacctgtccaacgtagaattcctgggcgcaatcgatcgtgcttatacgtacatcggtttcaaactgggtacgtgggatgaagagaacggaaaagttgtaagcaatgccgaagcaaaaatgggcgacaaaaacttgcgtaaagcaatgtggatggctgtagataacgatcaagtaggtaaacgtttctataatggtctgcgttggaatgcaacaaccctgattccaccgtctcacccagaattccatgattccaacaatccgggtgtagcatatgatccagaagcagcgaaagcattgctcgacgaagctggttacaaactggatggtgaattccgtacgaatccggatggaacaccactcgaaatcaactttgtatccatgactggtggagacacagctgaaccattggctcgttattatgttcaatcatgggcagctattggtttgaaagtaaatctggaaatggttgagttcaacagcttctatgaccgtgtaggtaacacaggtaaagatgatccgaacattgatgtgtatcaagcagcatggggcgttggtattgacgtagatccatctggtctgtatggccgtgatgcactctacaacttctccagattctccagcgaagagaatgacaaattgctggcacaaggtatctctgctgaagcatttgatgtagacaagcgtaaagagatctacaatcaatggcaacaatacatggtagatgaagttcctgtattccctacactgtatcgtgcagttgtagcacccgttaacaaacgtgtaatgaactatgcgattggtgatggaacaggcgtttacctgagcgacctgcaagttaatgcagacaaagcagttgtagctcagtaaaacattcttaaattagcagctgtaaggattggggtcctttaagaagccggttgctagattattaatgaagaattctcctgggaaaatgaataaaaagtgtctttaaaaacatggattctgtacactctggcatgggtgtatggggttcatgttttttttgtaaccaaaaaataaaaaaaatttaactttttttcaaaaaagtgcagacaaaatgcctctttacttcgtctatataggtaagaggtgatcatcttatgaaaaaatggtggaaacgggcaggtatgctgctggctctcttgcttattatatatttgggtgtgaaaccggacatgctggtaggcaaaccgggaattaaagctgaatctgcggtactaatggatatgaactctgaacagatcttaatggattttaacggctccgaagagattgctccggcaggcgtcagtaagttgatgacagaactgttagtaatggaggccgtgatcaatggtgatataggctggaatgatcttgttaatgtgagtctgtatgccagctccgtggggggcagtcaactgaccctgaaacaaggagagcaattcaccgttcaggagttgttcgagatcatagctgtctattcagccaatgatgcagcggttgctctggctgaacatatcagtggtacagagcagaagtttgtgcaacagatgaatcagaaagcaactcagattgggctgtctgaggatacacaattcacgaattcaacgggcctcagtgaaaagttgcttggtcctaaccgtccaatggatatacaagggcagaccttaatgacggctatagatgcatgcaagcttgcgcgatatctgctgaataaccatcccgagattttaagaatctccagtcaaatgcaagtatcaatgcatcaaaaagggatgtacatgagtaacacgaactggatgttgtcctctattggcgggccgtatgcttacgatgggaatgacggattaaagaccgggtatgatgaagattccggatatcattttgtggggacagctgaacgtgatggcaaaaggctgatatcagttgtatttggaacagatactcgtgaagggcgttttgtggagactcggaagttattcaactatgggttttcgggctcaaaataaaaaggcgtacataggcatcatcaaagagaccttcagggcgccaatgatccacctgtcaaacaaaccgagtcagaccagattattgacattacgcaagcgttagtacgttagataagatatgagggctgtccgcaggttcgactgaacatgtggtagctctattttatcgaattggaggtaaattgatccatataaccatattattaaattgacatatggttttcttttgttttaaaatgaccagtgagtcattattattcaactcggtttaatatatatgtaccaaaccaactgtacgatactgaatttacgatctgatcgggaggtaacatgtgatgcaaaaacaaatgaaatggccgctagttctgtttgccataggggtatttatggctgcgctggataatgggatcatcacctcttcactgaccaccttaaatgcatcatttggtgtgtcgccaacatggggagcatggacgattacgctttacacgcttgggcttgcggtgagtgtacctattgcaggcaaactgtcggaccgttatggtcgcaagaaactatttttgattgaagtggcgttgtttgggatcgggtccctgcttgtcgcgctgagcacatcgtttacctttttcctgattgctcgtgtcattcaagctttgggcggtggtgggatttttatcattgccagctcatatgtattaagcaagttcccggcggagcgacaaggtacagccttgggtctgctgggagggatgaatggtgttgccgctatcttgggacccaatgtcggtgcttttatactggatctgactggcaactggcattggttattcctgattaacgtgcctatcgccattctgctattcatagcaggtattcgatttattcaggaagagcaggaactgaatcgtgcagcagtggactggagcggcattgctgtcctaacgttgggtgtactcagtttaatgtatagcttcagcaatctggacggtgtgaacatgcttcaaagcctgggatcaccgatgttctacggctttttcttggcaggtgtgatcattctggtgctcttttacttcatggaaaaaaggctagaaggatctgaacgtgaacctgttgtatcgacacagcttctgggcattgcgtcctttcgctggacgctgttgattgcctttttctccggagccattctggcctcggtgatctttattcccggatttgttgagcaatatctcggcgtatccaatacggcttccgggtactggtttactccgcttgcgctggcatctggcatcggggcaggtggaggtggatacctcgttgaccgcaaagggccgatctggacgttatcggttgcggggctgttatctgccattggattcctgttgttcccgctatgggtggagcatatctggcaatttgtcatcgcgagtacactcgtaggtatcggtttcggcatgatgcttggtgcgccagttaacgtacttgtcacggaacaggcgggggagaacaacaaaggcatcgcggtagcgaccagttcgttattccgccagatggcgatggctattgcacctacgattttcgctggattcctggcacgttctttcgttaatctggggtccaacattcaggcaggattcgctgacaaaggaattcaggtgcctccggagatgctggagcaatatgcatcgggtggagcagcagggagtgatgtctccagtctgacagagggcctgtcccagattcctgatgaaggcatccgtgatgtgttgctccaggcagtgcatcaaacgacagggcagggttataatggccttttctggtctgcggtggtattcagtgtgcttacgctggtagctgcgcttataacgggacgtctgcgtcaaaaagagaagagccaacatgtggaaagtatatccacaaactgattcgataacgtaagaaatgaagagaacagtgcaccttttgtagctaaaaaggagtcgctgttcttttcaatttaaccggattgtaacttttcttgctcctgcaatgattacaatagaacgagcgtaagcggtgtcttgattcaagagagagaaaacttcagtgaacaccgagtcacaaggcatcccagacgtttaattggtattatggattatcattttgatagtgaagaaggaatcaatggatgaaaagcagaactaaggataagaagaagaaaagaagaaaaggcctatatataacgctcgtttcacttgttgttttgttaatcggagggtatttgttccgtcagcaactggctgtagcggcatttgatctgtttctcgccggttcggtagaagatcagttatcccgttcttatgtaccgcaagaaggcaacaacacgcctgatccaacggtataccgtaaggaacctttctccgtattactgctcggttcggataaacgcgcctatgagaagacgcgtggacgttccgataccgtcatctatgctgtagttcgtcccaaggaatcccgtgtgcttctggtatccattccacgtgatacgtatgtgcagattgtaggacgggatgccaacaaggacggcgaagatgattatgataagctggcgcatgcctatgcttttggtggggagaatatgtccatcaatacggtggagaaattccttgatgctgatgtgggttattatgcaacgatcaacttcgatggaatcaaaaaagtggttgatgcgctcggtggtgtaaaactgccaattgatgaggacattgtgaacaagaacccggatcatgtgcaattcacgattgaaggtggtaagccgatctatgacgggcaggaagcactgtattatgtaagataccgtgaggatagcgattttaatcgtaccaagcggcagcagattttcctgaacgcgatggcgaatgagatgctgaatttgaatcaaatcgccaaaattccggaattgattcagatcatgggtgacagtttccagacggatatgcgagcatctttcattattgatctggccaaacaagtgcttactcaggagaaaccgcagatttcaagcttcaccatcctgggtgagggaatgaaaaaagacggtatctattatggtcaggctgacgagaaagatgtccaatatgccaaagagctgattaacaactggatggatcaatcgaccccagccggtgaagtcatgatccctgaccggcaaaagattgaataaccaattccataccaatgatgtgttgtagaccacaatcagcagtacgtttattcgcgggctgctgttttttttctttgtattgagaactattatccttttggaacatcctgcgttctaatccgtataatataagttgagcgagataagttgaacgaagaaattcacaaggaggatacacaagggtatgaacatcgcattttttttgctacccaaacaagaggttacgtgcgtgacgtcggattctacgctgcggcaaacgttggaacggatggaatatcatcgttttacggcggtacccattttgaataaagagggcaaatatattggtacggttaccgaaggcgacttactgtggtatatgaagaatgccgagggaaagatttcatttgaaaacgcttcaaagttcttgctcaaggatgttccccttcgcttggatattaaacctgtatccattaacgccaacatggaggacctgattaatctggctaaagttcagaactttgttcctgtggtcgatgatatggatcggttcattggtattgtcagacggagtcagattattgagtactgcgagggcattgtagccaaagaatcgatcaaggctaagtaagtctgttacgaatttaaacattattgtttcattagggataatcacagccgtccggtatcatgttaaacttaagaagtcctgaatcaggggcggattcgaagttttttacaaatatataggtcgataggatgtacggaggactccgcataagtacctgacatcagtttcggagaacttctccgttttttggggtaattttgcgggccctctttttatgctataatcgagaataaagctttttcgggggagagtgactttcgccaatatgcctaaagaactggatgtagccaaacgcgctaaagtgattgaatggctgaaaaccgaagtgcttgatcaggtatcccgattattcaaggcgttatgggaaggcagtacaactcgaatcggggacagtcttgccagtttgattatgagtagttacatattgggccgcaggctcggtattcctttcaaggatctggatgcactgctagttgagaagttgaaaaagcataaacaggaaggtcaccagcttgaagactggtaccaggatatttccgcgctagaagatcatatgcgtaagaggtgaatttgttgaaatttagctttaaatcagctgtttggagcgcagtttatctgctcttgctactttcgctgttaactcctttatcggtacttgccatattttttatgatgattccgggagttattttgtatgcttcattatctttaaaatcatttatatggcatctcgtgcccgtagccgttattttggtcgtattccaccccatctatctgttactattgctcatctttaccctgcctgcgatcgttatgggtcacgcgtataaaacacgcaaatcagccctgttcgccctgatggcgggaagtggcatgatgttggcagaatacttgttgttgctcttggtcggcagtgtcattttccaattcgacctgtccagttatattgaagatgtggtcaaattgaccattgaaccgttaaccaatacatcgaatcagatgatcaacgggtttgcatggacacctgagatgaccgaggatgttgccaaacaaacacagcttatgattccgtttgctctcgttgtcacatcgatggtaatggcctttattacacacgccatagctcgtccgattctgaacgtgatgggtgtggtggtatcgaagcttccaccagcgagagagtggcgtatgccgcgtgcattgatctggtattatttccttgcactgttgatcgaagtgatctccagacaaagtgatggaacgtactggaccatgattgccatgaatctgtcgccgttaatcaatctgggcttcatgattcaagcgatcggtttcttcttctttctctcacatacaaagaaatggaatccggttataccatatttcctggcggctgcggtcttcttcattggtccgcttcggattatcggaattatcgatctggcgttcccgcttcgtgaggcaatatcgaaatcaaaacgatagggtgatgagtcatgcctaaatttctgaagaaacgctggcacggctactataccgtatgggcgttcatactgctgctgttgctcgttatgttcgttaccatttataactggacgcttggtttgattagtctgatactggcttcggcgctgggaatcgtcatgattaaggcggagctcgcgttccgccgtgagcttaacgactacattaatggcctatctattcggatcaaacggatggagggggaagcggtcagcatgcttccattcggaattgtgctgtacagcgaagatcgtacggtagagtggcataaccgctttgtcgcggagatgttccaggagaagacaatggtgggtaatccgctacttaatatgtttcccaaacttcctcagcctaaagagaagaaggatgggacgaaggaacattcatccaaggagttgcatgacgaattccagttggatgatcggcattatggagttattcataacccgcaggagcggtatgtatatgtatacgagattacggagctagccattcttcgtgataaatatgaaaatgaacgccttgcattgggaattctcgttctggataatctggacgaggctgcccaaggcatggacgatcaacagcgtacagcgctgattgcccgtgtgactagcgagattacgtcatgggccaagcggtacgaagtgtacctgcgccgtctgtcttctgatcgttatctgttgatgctgaatcataagtctttgcaggaactggagcagagccgatttgtcattttggatgaagttcgggagatgactgctgacctcaaagtgccaatgacactcagtgttggactggcgtttggatcggatagcatcagtgagatgggagaactggcacagtccagtctggacatggcacttggacgtggtggtgatcaggctgccgtgaagtccggacaacgcctgtctttctatggcggcaagtctaacgcagtggagaaacggacacgggtaagagcccgcgttattgcgcacgcgctgcgtgatctgatgcaggagagcgaccgggtgctcatcatggggcacaaaattccggatatggacgcgatcggcgcatccatcggagtgtggaaagcggccagtctgtacaatgtggaagcacggattgttctggatggaattaatccatcgattgaacgcatgatggagcaagtgaacaaggacgagaagttgtccaaagcatttgtatcaccggaacaggcaacccagatgatgaccgagcacacgttgctggtggtggtcgatacgcataaggcctccatgaccatggagccgaaactggtacagtctgctacccgtgtcgtagtagtggatcaccatcgccggggtgaagagttcatcaatgacgcagtgttgatctatctggaaccttatgcgtcctctgctgccgaattggtaacagaactcttgcaatacattcatgataaggtacaattcactccgctagaagctacggctctacttgccgggattacggtggatacgaagcattttgcactgcacaccgggtccaggacgtttgaagcagcaggcttcttgcgccgtagcggtgcggacaccattatgatccagcggttgatgaaagaggatctgtcagaatatattgctaaggcagaaatcataaagcatgctaaaatggtatatggaaacattgcgctggcggtcaccgaccctggcagcaagatttcacagatgatgatcgcccaggtggcggacacattgctgaacatgactgacgtggtcgcttcatttgtaattagtgagcgtccggatggactgattggcatcagcgcgagatcgctggggcgcatgaatgttcaggttgtcatggaacgactgggcggtggcggacatttgacgaatgctgccgtgcagcttgaaggaacgcttggagaggcagaaaaacggctgacgaacgtactggctgaaatcgaaaaggaagaggggctgttcgaatgaaagtcatttttataaaagatatgaagggtcaaggcaagaaagggcaagtgaaagaagtatctgagggttacgcacagaacttcctattgccacggggaatcgcacgtctggcaacagacggcaacatgaagacactggacaaccagaaggcggctgaagaaagactcaaacaggaagagaaagcggaagcggaagcacttgcgaaaaagctggaagcagaagtgactgaactgaaagccaagtccggcgaaggtggtcgtctgtttggcgccattactagcaaacagatcgcagaagctttgtctaaaaagggtctgaaagtagacaaacgcaaaattgagctggacgagcctattcgtacactcggcgtaacacaagtaactgtcaaggttcaccctgaagtgaaggcaaccttgaaggtacaggtaacggaagagtaagatgggcggagaaatgttattcgaccggattcccccgcagaacctggaagccgaacaggccgtgctgggtgcaatcctgttgcagggcgaggccctgattacagcgatggaacgggtgcaaaccgaggatttctatgataaaccccatcaattaatctttgaagcgatgatccagcttggtgagggaaatcaaccgattgaccttgttacactgacttcgcttctgaaggataaaggtgagttggaggacatcgggggcgttagttatctggctaagctagcccatggtgtacctacagccgcgaacgtagactattacgctcagattatcgaagagaaatcgatgctgcgtcgcctgattcgtacggcaacacagatcgtgagcgaaggatatacaggcggagaagatgttgcagcgatgctcggagaagctgaacgtcgcattctggagatctccaaccgtcgctccagtagtggttttatagccatacaggacgtactgatggaagtattcgatcgtgtggaaacacttcatcagaataagggtacaacaacaggtattccgtccgggtttatcgatctggacaagatgactgccggattccagcgcagtgacttgatcattgtagcggcccgtccttccgtaggtaagacggcctttgccctgaatatcgctcagaacgttgccattcgggcacaggagacggtagccatcttcagtctggagatgtcagccgcccagctggtgcaacgtatgatctgtgcggaagccaacctggatgccagcgtaatgcgtatgggtgacttcaagggtgatgaagactggcagaagctgacgatgggtattgcagctttgtcagaagccaacatcttcatagatgatacgccagggattaccgtagcggatattcgtgccaaatgccgtcgtctgaagaaagagaaaggccttggcatgatcctgatcgactatcttcaactgattagtggacgtggtaaagcaggggagaaccgtcaacaagaggtatccgagatctcacgtacactgaaacagattggccgggaactggaagttccggttattgccttgtcccagctgagccggggtgtagagcaacgtcaggacaaacgtccgatgatgagtgacttgcgggaatcgggttcaatcgagcaagatgccgacatcgtagcgttcctgtaccgggatgactactataaccaggagaccgagaagaaaaatattatcgagatcattatcgctaaacagcgtaacggtccggtaggtacggtggaactggtcttcctgaaaaactttaataaattcgtcaattacgagagggcgcacaatgacgccttcgcgatgtaacgggcaggtgctgacgacttcgatcaagaagccagaatcgtctgtcccgaagatcaaccattagagcaactgaacgcaaacatgtgttataaataccagatatagattcacattaaaatgggtatccttgaaccggtgatagcagtcaagcaagcttggactgaagtctccggttttttgtgttgaaataataggtaaatcccgaacattacggttgtactatatctaattgttcgccatttgatttgactttgaaaaagggtactggtacactaatactgctgcgttaaagcagcgcaaaccttcccttgaatgtaacggaaggacatttttactgtccgttagcacgcttctcagtcggtttattgcgtaacacgcctgccgggatagaggacggacagaccaatacaaaggtgcgcaaggcacccacggaggaatgttaactatgtcaacggtagttgtagtgggaacgcaatggggagacgaaggaaaaggtaaaatcacggattatttggcggagagcgctgatgtggtggctcgttatcaaggtggtaacaatgcgggtcatacaattctgattgataacaaaaaatataaactgacgatgattccatcagggattttctacacagataaagcgtgtgttattggtaacggaatggttatcaacccgaaggcactcatcgaagaaattaactatattcatgacaatgattttacaacgaagaacctgtccatcagtgagcgcgcacatatcatcttgccatatcacatggtactggatgcactcgaagaagagagcaaaggtccgaacaaaatcggtacaactggcaaaggaattggcccatgttacatggacaaatcagcccgtattggtattcggatggttgacctgctggatgctgaagatttcgaactgaaactgcgtcatctggtcaaagaaaagaaccgtgtcatcgagcaagtctatggcggccagcctgttgatgtggaagagattctgcaagattacctcggatatgctgaaattctgcgtccttacgtacgtgatacatccgttgtactgaacgaatatattgatgaggacaaaaaagtattgtttgaaggtgcacaaggcgttatgttggaccttgatcaaggaacttatccatttgttacatcatccaatccgtccgcaggtggcgtatgtatcggttctggcgtaggcccggctcgtattcaacaagtcattggggtagcgaaagcttacacaacccgtgtaggagatggcccattccctacggaattgcatgatgcaatcggtgaccaaatccgtgagactggacatgagtacggtacggtaactggacgtccacgtcgtgtaggttggttcgatagtgttgttgttcgccacgcgcgtcgtgtcagtggaatcacaggtctgtccctgaactctctggacgtaatgacaggtctggaaaccgtaaaaatctgcacaggatacaaattccgcggcgaggtcatcacacactatccggcaagcctcaaaatgctggcagaatgtgaagcggtatacgaagagatgccaggctggagcgaagatatcactggagcgaagaaactcgaagacctgccagtgaacacacagaattatgtaaaacgtgtttccgaactgacaggcattccaattgccatcttctccgttggtcgtaaccgtgagcaaacaaatcaagttcttccaatctacgagtaatcgaagaaatagagagattgtttcttgaattataaaatagaatcctctgccgacttaggcatgttaagcctccagttgttgcttttatagcgatgactggaggctttttgtatgtttttcggatataatcccgagatttccgtcaatactggttaacagtagagtcacagaccccgacatgcgcatgttagacgggtgggataatcggagggagagaacggaatgaagttgcttgtgtggtttgttaaaatcgtgctaaccgtgttgctggtcagttcactgacactgctcacgacaggattaattgtacagtcatatacgaagtcgctactcgcgagtttcaatattcagtgggaaggtcaacccatggggttaaccgccatgttccaaggtgccttgggcggtaaaaccagcgaggggaacaaatcgggaaatgggacgacagatcaaccgacaggtgcggacgaagagcaggttccggaagatgctgtttcagttatggggaatgggacggagagtggtcaatctggcgtagatgcaggcaacaacgcgtcccaagggagcggctcaaacgagggcacgggggaaggttcaggtacagatacgaccgtaggatcaaactcaggcacaagtgcaggcaatgggacggatacgggcacgggtaatgactcaggaacagatcagggtagtggatcagcttcagggaacggaaccggagcggccagcggaggtgcttcttcaggcaatgatgctattgtcgtatcaccggatgacattacaggagcgaaggacaagctgccagcagaggagaaagaaaaaatcttcagcctgctcatgaacaagctgccgcagaaagagatgcagcagatctcaggtgccatggaaggtggcctaacggaacaggaattacgtgagattgaacaggtgatctcgaagtacctgaccagtgaagagtacgacaacctgatggaagtactgcaaacagaataggatgataggcaggcagggaagacaggcgtgctcatagacgtatcgcctgattcataatgtaatggacttgtcgaggatgattgaatataatttatttatataaattctggaaatgcctgtaggagggaaaagtgtatgaaatataaaggtaaagaacacaacatataaaaacgttcaggcaacattgcagaaacctccagtccaattcgtggacctccgttcataggtgctttcaagagaaccgatggacttgtgtttacgaatacactaattggaggttgtattgaccatgaacttatatcattctaattcagaaccatcagtaaaagagtttgccgaggcggcgaaagagcgatacgagcaagggctgcaagaggcggaccagccgtttagtggctgggattttagctatgtaacagggagtgggcgactccagagcggaatattgccttggtcatatggaacgatggcgcgccgattattgaatcaaacagaacgaatgctcgacatggggactggtggaggagagatgctgtccagactccgtccccttcctccatacacatgtgcgaccgagggctatctccccaatatacctattgcagaggaacgtttacagccgctcggtgtgaaggtgcttccagtaactgatgattcgcaacttcctttcacagatggggaattcgatctgattcttaatcggcatgagtcgtatgatgagcgggaagttaggcggattctatcggtagggggaatgtttctaactcaacaggtaggttggtcagattgcagggagatcaatgatcggctcggcattcctatgccagcggattacgctggatgggaactggatcgtgctgttcttcagctggaacagtctggattccgtattctggagcaacgggaagcaacccctgcacaacgtttctatgatataggcgcactggtatattatctaaagactatcccgtggcaagtacctgatttcaaagtggaacagttccgtcagccgttaatggatattcatatggagatggagcacaatggattctgggaagtacagcagaagcgatttgtaattcttgcagtcaaagaatagagaaataaaagttaatttctattgtggcatgagatgaaatccagtttaagataaaccacaaacaggttgtttacgtaatcccttatcagagttgatctggtgagggattttatttgtatttttatgaaaaataaagcatatttcactgggtcttagaacctagtcttaaattgcaagcaaaagtacatagtacagcgcatgttgaggcataatgggtgatggaccagccgcactatcttatggataattcagggaaagcaagcggggcgtggctttgcggtgtgacgtgtagagttgaaatgagtgtaaaacctgtgttaaagtatacgggtgtgataaaaggttaaaattttgacacttttacgagcgcagctaaagtcctgattttgcggacacccaatacaagtatcaacgagcatgggacagacacgatgggtgatgtcttgacagaaatgcgaactgagaagtgctgaaaaggagagaatcatgaaaggtttcagaggcatacgccaaccgggcaaagaccgggtacacgaacaatccggggaacaccggacggccgaagacaaaaacaacatgagcatgtccaccttcagtgtgaataagaagcgcgttctggcctcgcgcaaatggatcattacagcagcatgtggtgtattcatcgcagcatcgctcgggttcgcaggcaaacaatatgttactgcaaacaccgtaccgtactataaagtaatggttaaaggtagcgagattggtaccattgcagatgaggcacaattacaacaactatttacagacaaaactgaggaatatcaacataaatatccggatgcagagatggtgctgaacacggatggcatcacaaccgaaacggtaagagcgtacaaacctgaagtgaacagtgacgagacgctggacaaactgggtgacatgctgacagcctacgccaaaggtgtggagctcaaggtagacggtgaagtcattggtatcgtgaaggatcaggcaacagcggatgcaatcctggaacaagtgcagagcaaatacatatcggcatcggctgtgcgaagttcgctgaagacgaagtcggtatcggctaactcctcgaagaaagacgagggaccaagcacaactttgaagtcggtaggcatcaaggaagatgtagcgacagatgtggtgaaggctgatccaaacaaaatatgggatgtgtccgaggcggttaaagctttaaccgttggtaaagacgcgcctgtaacttatgtggttcgtgaaggagatacaatctcttcgatcgctgccaagtatgaaattacacaaagcgagattcgcaaaaataatccgggcatcaaggaaacgtcgcttcaaatcggagacgaactgaccttgaccgttccgaaaccggcggtaaccgttaaatcggttgagcaggtttcggaacagattgagatcaaaccgcaagtggaagtgcgcaaaagtgacgagttgaaagcaggtacaacaaaagtcgtgcgcccaggacaaagcggcttgaaaagcatgcagtatcgtataaccaaagaaaatggtgaagtggttcaggaagagtggcttggtcaggaagtgattagagcagctgtaactgaagtagtccttagcggaacaaaagttgttggtgaaggctcaggtgaatttgcttggccggtatcaaatgcaacgatgagtagtagctttggacaacgttggggtcgccagcacaaaggtgtcgatctggtaggtaaccgcgatgtgaaagcgtctgatgagggcgtaattacttttgcaggacagaaaagcggctatggtaatgtcatcattattaaccaccgtaacggatacgaaacactgtatggacatttgaacagcattggcgtcaaggttggacaagtggttgaaaaaggcgagagtatcggcgttatgggcaacacgggtcgttcgactggaacacatctgcattttgagattattaagaatggaacggtagaaaatccgttaacgtatctgaactaatatagagcttaagtagagcaaggttggctataatgctggccttgttttttgctgctgtaaaaaattttcagatgaaagaccttccaaccctccgatcgggatgtgacggtgcttcaggtatgttaaactagagagtataaacaacaaactagagaaacaaatcaagtaggcttggtacaagctaaacatagaagagagatataaacgctaacgcggattaagcaggatataggggtgaacttagccgatgcaggggaagattttggtggtggacgatgaacagcccatcgcggacattctgaagtttaatttggaaaaagagggttacgaggtcatctgtgcatttgatggcattcgtgcggttgaattggcgttatccgagaaaccggacctgatgctgctggatctgatgctcccgggcaaggacggtatggatgtctgtcgcgaggtgcgcgctcatctagagatgccaatcattatgcttaccgccaaagatggcgagatcgacaaggtgctcggactagaattgggtgcggatgattacgtgacgaagccattcagtacgcgtgagttgcttgcacgggtgaaggcacagatgcgcagacggcaaaaacttgcgattacggcagaagcgcacgaagacgaagagaagcaggtcatgcggctgtttgatctggcgtttgatatggacatgtatacggcttataaaggcggagaaccgcttgatctgacccaccgtgaatatgaacttctctattatatggcgaagcattccggcaaggttatgacacgggaacatctgctgcaagcggtatggggatatgaatatttcggtgatgtacgtaccgtggatgtcacgatccgtcgtttgcgtgagaagattgaggagaatccgagcaaaccggaaacgattctgactcgccgcgggctcggttatctcgtgcgcagtgccaaaagcgtggggatataatgggccgattcgcgcgattttcgttcttccgaacgattcaggcgaaattgatcattatctatgtactgctgattctgattgcgatgcaattgatcggggtttattttgtgagcgcgatgaagaactcactaacgagcaactttacggaagacttgcaggcgcgtgcggagatgctgtcggttctcgtgggggagacgatggctggtggagaagcagaggctggcgaggacaaaacggaaaatctgcgtgtgctggtgaacaacctgttcaacattaacggtgccgagattcaggtgctggatgccagcggcaaggtactcacgacctcgctaagttcacattcggactatgtgggtcgcaaaaacacccagaccgtcgtcagccgtgcgctgcaaggcattcgggataatgaggaatatatcgtggacgaggataatgttcgcaaaaaggtcgtcgccaagccggtgctgtccggcggcaagatcattggtgcggtctacatcgcggcatccatgaacgagctgtactccacgatggagggaatcaacaaaatctttatctccggcattttgattgccttggtgctaacggcggtacttggcgtgatcttgtcccatacgattacgcagccgattaaagaagtgactcgcagagcgacagcggtcgcagaaggtaactttgatcagcagacacctgtatttggcacagatgagattggtcagctcagtcgggcttttaactatatgaccagcaggcttcgggatgcactctcccagaatgaagaggagaaggagaagctgacctccattctgacgaatatgagtgatggtgtggtggctacggatgagtacggtaaagtcattctcgtaaatcgtcgtgccagcagcattttgggtatgcatcctgcggatattgaaggaagacacttcgctatattactcggtattgatccggaggatgcggaagctctcgcgagtggtttcacaggttcaacgttgctgcagattgcacccgcaggacaagaagaacctgtggtcattcggatgacgtttacaccggttcaccggcgtgaacgggggatcacgggaacgattgccgtacttcaggatgttacggagcaggaagagcttgaggcatcccggcgtgaattcgtagccaatgtatcccatgaactgcgtacaccactgaccacgatcaagagttacgcggaagcactggatgacggtgcactggaagatccgcagcttgccggtcgtttcgtgggtgttattcagaacgagacggagcgaatgatacgactggttacggatctgctgcatctatctcggctggattccaaagaggctttgctacgtaaacagccaaccgatatcctggaaatgttggaggaagtgacggatcgattctcgtttcagatgcatcagaaggatattcagcctgtgttatctgtggagaatgatattccggctgttccgctggatcgtgatcagattgatcaggtgctggataatgtcgtgtccaatgcgctgaaatatacattggaaggcggcaccattacgattgcggctagacgaagtgatgaacatgcacttgccatctcggtatcggataccggaatgggtatcccacagcgcgatctggatcgcatttttgagcgattttatcgggtggacaaggctcgttcccgcagtatgggaggcacagggttaggactgtccattgcccgggaaattgtgaaggcacatgatggaagcatctctctggagtctgaagtagatgtgggaacgacagtaacgttcacactgccgatgcgtgagaaagggggtgagcaccgtgaaggaacggattaaatccttggtgcttgctgcccttgttgtagccagtttggttcagagttattttctgatctaccgtttgcccggaggcggggattccattgtgacgtcagaaacgaactatgtgaagacggaaaatatgggtcaggaacgcaatattgaagaattgatcttccccgatcagatgattattcatctcggtgaggataaacatacggtgttttaccctggcaatacgttctatcagttaatctattcgcggttacaggggcgggcgttcgatgattttcagcgccgcagtgtgcaatcggtgaactgggatcagattcgcaaggagaaccctgggtttgagctatcgttcaaagaaggtattcccgtagcattgttacagcgggtgatgaggcttgggacggattccttgttccaaggggagaccattaaccgaatctcgatctatacgtccaaaaatgaaacgaaggcccatgcgctgttcttcagcgccaagggagacgtggtatacgaagcaacgcaggcggacctgacagtacaagacgtgcagcagcatgttgacttcggtacgaactggacgccatatacgctgatggatggcgggtattatatcccggccgaagctctggagacgattgaggcagatgtgccgacagggcagttcacggttgagcaaatgcagcgtagtctgttcttcgatccaagtatgacccgcaacatacgggaaaaagatggatcggagatatacacggacagtaaacgtagtctgcaggtaaaacaggaacagcgctggatcagttacaccgatccggcggcaccgcctgcgggacagattgatcccgcgaaggatgcgctgtctgcggttgattttgtgaatcagcatggtggctggaaaggccggtcgcgcatgatgctggagaccgccgacagcaagacgcagcttgaattccagcagtattatggcagctatccgattatggattccatgcagttccgctttggcacgatcagcatggagatgcaacaggagacggtatccagctatgaacgatcgctggaatacctgaacgaaggtgcagagacgaagaaatcggtcaaattgcctggcggagacaagctgaaggctcttattaaaaaggtcgcaggtgagaatcgccaggtggtggatgtctacccggcgtatcgtccttcttcaattgaggacggactaaagctgatcccggtatgggtgatccgctttggaaatggtgaggaaactaccgtatcttgataggttatagtctttgaaccaaagagtagctgtactttatcactacgcgtgcagaataaccttccgatcgctgttacccccagatttcttgaattcccttttaacacgggagaaatctggtggtaaaggcgaacgctccgcttcttcaggttatttctgccctctccgttatcgtatagctttaagttcaaaggctataaacggccagttccggtggaaggtgtaggcaacttgagaaagtattgcaagcagctaagttagggggggatgttttggattggggacgggcgaaaaatgtgttgatctatgcctttctgctgctcaatctggtgctgggataccagatctggatggatgcgcgagagacggccggagccaatctggacttcacctcactggcagataatacacagcaggcgatggaagagaagggcattcaggtgctggctccgattccaaatgaaacgccaaagctgccaaagttgtcctatgagttcattgaagaggacagggctggcgtggatatggaactggaacagcctgtagatagcaagttgatcttctcgcaaagtgagctggaagatgcattagagcgtgagattccacagatcgggacataccggctggatcagctgatggccgaggatggggcttttgtgcttcacccactggtcgatggtaaatggccgctcttcaatgtgagtctggagctattctacagcgaccagaaaataacgggttaccgtcagactccagtgcggattacgaccgcagaggagagcgatcagcaggtgcttccggcgtcgaaggcgctgggaacgctgatcgagaactttttgccaaatgatgcaattgtcaaagatattcagctgggctattacggccagttgttcaattcagatatacaggtagcgatgccggcatggcggttcgtgctggaaagtggcgaagtgttgtacgtgcagggcatcagtggggatgtattcagtcccaagacagacaaaccaggggagtaatgcgttatggggatatattttaccgtgttatccagcggttcgacaggtaatgccacagtcatacaacatgggggcacatctctcatgattgatgcgggtcttagtgcgaagcgattggatgcactgtttcaggaaagggagatttctggggcagaactggacgggattctggttacacatgaacattccgatcacattaaaggactaggcgcgatgtctcggaaatataatttaccaatctacgcgaatctgaatacgtgggcggcactggagaagtcggttggggcgattccagaggaaaaccggagggtatttgagacaggtgaaaagcatgattttgggtcactgcgcgtggagtccttcgggatctcgcatgatgcggctgagccggtagggtatacgtttgatgacggcagtgagaagctgtctgttgcaacggatctggggtacatgagcgacaaggttcgcgatgcaatctccgattctgacgtgctggtgctggaggcgaaccatgatgtcgaattgctgcgtatggggcgttatccatggaacaccaagcgccggattttgagcgacattgggcatttgtcgaacgaagcggcaggggcagcgcttagtgaactgatgaacggacgcatcaagcgcacgtatctggcacatcttagccgagatcataatatgatggacttggcgaaaatgtcggtgcgcgacgcgatggagagccgtggatgtttttatcaggatcatgagttcaaactttgtgatacgtattacgatcgtcctacgccatgggatagggtgggtgagccataaagctgtccagttcggcggctttgcgctcaacttcctcgcgggttaggatgcctttatcaataagtagttcaatgatggtgctgagtgcaagggtattgcgatagtgttcttccttgagatcggccagcttggccgccatatgaacttcatccatggctgtaagtgtacgtgtgcgatccatatatatcctcctctatgaagcttcgaattgtcttttactattattgtagtcaggcttgatggaaaacattcctctttttgccgctaacatttgtgtgatgagacgtgtatgctgaacctgtgactatgcagggatgaaaaagttcttcaaatttgccaaaatggcgcttagcggaccggattttgtggtgatagatactatggacctttattgttaagcgcgttatagcggaaatttgctttaattttcgtaaatatgcaactttttgtgatttgacgtgtttagtatatgaggagcattgtgattttggctgttttgcgtgtgaaatggcatgtcatagaatgcgagagcatgattgatagagtcactgacagaatggtgtgtccgttctgttgtacatagacgctgtatcttgatttgatgccgggatgcggcgatatgcaagaccattttttaaaattgcaaaaaagcatgggaaaacgagaggttatttacggtacgcacgtaacgaaagacacagaacgaggctggagaagcgtagcgttcgcctttatgaacaaattttacctaggaaaaagaaataaaaaaatttgtgagtaacagcgatcggaagctcggctgtggctggagtggggtaacgtaagaacaccatcgttgaaccatgcgacaacttaggcggcagtcagggtcttgatgcgtgacaacgaaggggagaggatcacgatgggattgtttggagacgatttttattcaaccaaagtatcaagacgcgccgaacctgaacagaaaggcaaacttcagatcatccgccctggaggcagagcacgtggacgtgaccgctggagcaatccgcgcagatcgcgaacgggaatcagttccacagtgaaggtagctgtgattagctcggtgatcagctccatcgtgaccgtcatgctgtttagcttcatcacacagcccacatcgttaccgctggctaatgctacaggtaatggtggtggaggcggtgcacagacagcgcaggcagctgatccatacgaccggattatccaagcagcagcccatgttcgtccttccgtggtgagcattgtgaaccataaaacgggtagcagtctatcgatggaagattcggcgctgggctcaggggtcattttcaagaaggaagatggcaaggcttatattatgaccaaccaccacgttgtggagggtgcgagtgatctggagattgtaaccgtagatggggagacacataaggcaaagctggtcggtaaagatcgtgtaagtgacattgctgtactatccgcagaagataaagggctaggtgcagtcgcggagattggcgattccagcaaacttcagcggggtcaaacggtgctggcgatcgggaatccgctcggtctgggcggtacgctgacatccggtattgtcagttacacggatcgtattctgcctgtatcgattaatcaggacggagtgtacgactgggagcaaaacgtaatccagacggatgcggcgattaatgaaggtaatagcggcggtgctttggtcgatctgaacggcaaagtggtcggcatcaacacgatgaagatctcggatacgggcgttgaaggtcttggcttcgcgattccgatgaacgaagtgatgaaaacggtcgattctctgttactgaacggtaaagtatctcgtccatatcttggcgtgtacacggtggatctgagcaacccttatgcaccactggatgatgagcagcgtaaagatctgaagctgccatctcacgtggacagcggcgtggttgtgttggaagcatccggtccggcatccgaagcaggtatgaagctgaatgatgtcattacggaatttgacgggcaaaaaattacctccacgctggatctacggaagtatctgtacgatgagaagaagattggagataccattgaagtgaccttctaccgggatggcaaagcggagaaagtatcagtgaagctgacggataaaccggagtaagggaagtttcgaacggagcttatgctgttgtttggattgtaataggggaatgctagaagagtgatcagatcaactgaccactcttttttagttattatgggtggatgtgctcgttcgacagtaaatgagtagatcaaccatttttatattctcatgatcagttagacccggagccaaaggagcagatacataagactagggctgtggtaaactgttgtcaatatgttggagacggtcgctgatgcaataacatctgtttgtcgatctgattttatttcagaatggaaggggtatttttgatgaaacatttgaagaaaaagatgcttgggggaacgagtttggctctgtccctatttatgttgtccgcctgtgggtctgaggtagctacgacaggagcatctgtagatacaagtgctctgcaagagaagattgcagggcttgagaagaaactggtggagcagggagccaagagcgttgagcaggagcaaaagatcgcagcacttgagaccaagttgaatgagttgagtacaagtgtgattgcggtaggtgaggctggtggtcaaacgcctgtaacatcgggaaacaacggatcggctgggaaaggcgatggggtgctgattacctttgcccagtatgagaagcttgaggttggcatgtcggtgggagatgtcatcgagatcctcggtggtgaaggtgaagcattgagtgaagcggagaatatggtggtttacaactataaaggcacagccggcaatggtgctaatgctgttattgcttttcaaggcgggaagctgttgacgaaggcgcagtcgggattgaagtaaaagagtttgggatagaaacaattcatagattggaatggaacagggcaataagtaactctgtattcgtaattcaggcgcaggagcaagattcattcgctatgtgaattggattgttactgttacaggagcattcttttcaggtaccgtagaggtatctggaagggatgctttttgtgttcttttatggcgtatggagaggtttggtggatgttgtacacgataaattagggctaggggtttcttttcagtggcaggtgtgatagaactgagaagtggctatcctgtaatgggataagcggttgtgaatcgggaacatagctggttacagaaaggatgcttaacggatgtacgttgtatgcaaagaacacgtggacattgccatcgacatgtttgtagatgagtatgaggacgctccagatatcgttgatctgaaggagacggaatttgccgactgggacccgcctgcgaagtgcgccgagtgcgaacagcacgcggaattcctcgtcgtttagcgtactgtaggacttagatggctggtggcgcgacttaaggtggcgcttcgggctaactttccatccggtatgaacatcacagcaagaagccaaggagagcgtgatgagcgctctttttgtgtttgtgggggaattggtgtgattgttggtaggcagcttggagttgggcaagggttgtaggggctgacggtgaagtagggatagtaggagaagattaagataggtaggtgtcgagttccgagttgggagtgagttaggttgtagcaaaggtggaaggtgtaggtaatagaaatggatgccacccgggcatggggaaagtgaagttgtgtgacagcgatgtgggtagggatggaggcgtggcttggtcgagtagctctaacgaacctgagggaccttattaggggcaaataccgcttggttgaaatctaacgaatcgtagacacgttatattactgaaatggcctcgaaagaggtggggaacgcttgttttaactgagatagcgtgtttcagattcgttagattttaaaggagccgaaatggggctgaataaggtgtgtaggattcgttagaatttggagaaatgtgtagtataggtataatacagttggaacgaacgatgcgatgaagcatcttacttatagaatatctcgcaagacaatttaggaggaatgggttgttatgtttattcagattattggcgtaggcaaattgaaggaaaaatatctcacgctgggcattcaagaatatgccaagcggctcgccccgtacattaagtttcagatgatcgaggtcgcagacgaaaaggcgcccgataccctgagcgaagctgaggttcgggcagtaaaagagcgcgagggcgaacgtatcctcgcgcatgtgaagagcgaggcgcatgttgtcgcgctcgcgttggatggccagctctggagttccgaggagctggcattggagatcgacaagctcggcacgtatgggacgagccatgtcgtgtttgtcatcggaggaagccacgggctttccgatgaggtgttgcgccgcgcgaagcagcgcttgagcttcgggcgcatgaccctgccgcatcagttaatgcggctggtgctggtggagcagatttatcgcgctgtgaagataaatcgcggtgaaccctaccacaagtaagaacactcacgttcgcatacttatgtctccacccttgaaaaattgaaagaatgggaaaataattggagagtagagagtagagagtagagagtagagagtagagagtagagagtagagagtagagagtagagagtagagagtagctacttctaaccgccgccttatttcaatggaaaatggatcgatgaactctcgaatgaattaggtctttcctacgaaagtattgaagaattatttactcaagaacatagatttatttgtaagtcacatcgtgctttccgatgtgactttttatgtgaaagttgattctaatcaaattctgcatatatctcatttggcacctcctgttaccatagaagtaaaggggagaaattatatggataaaaagattaaactactattcacaaaagatatattgaaagagtccgcacaatgttttggaatacgtgagaactccattatcgaattaaatgggtttcaaaatttcgtttattccggcgtcgttggaaatagagaagtcattttaagaattacgcatgtcacccatcgaaatgaattattaacaagagcggaactagatttcatcatgtttctggctgatcgcggaatgaaagtagcaaggcctattcaatctttatcaggggatcttattcatatcattgacaggtcctttattgtgacagcttttgagaaagcactaggcagaaatgcagtaatcgccgaggagagcaatacgttttatgaaaatattggacaaatggtcgggaaaatacataagttatcgcttaattactcgacccaaaacccacgccatgaatggagtggtaatactctattagaatcttttaagaagtattgtccgttagaattacacagtaactatgatcgtttaattaatgaaattagtgccctgcccaaggaaaaaaatacatacggtcttattcatggggatatcagccctggcaattatcttaatgatggggataaagcctttattattgactatgatgaggtggaatatagctggtttgtttctgatattgctacaccattattttatgaaatcccaattccttgggttgtgtctggagatgtgaggaaggagattgcaaaacggtactattgcaacttcttaaatggctattgcaaggaatacactgtaagccaaagccagttaaacaaggttccactatttataaatttaaggcaggctagagttttagctgcgctctatagaagcagagactttaacgctcctgattggactgaatggtatgagcaagcccgacgcttctactatgaaaatttattaaataacacgccttatattgatatggactttttgagttaaccggtgaaccccgtcacaattagcggagtagaggctttacacacaagaaagatccaatcacctgaaatgactggaccctcaatcataaacttaaatttcaaaatcaatcgtacccttttcggttaattcaaaaggaccagctgtgacatctgcatcgggtctctttgatccgaaaaaatcagagtcaaaatgatatggagtgctgtccggttcctcaaacttcatgttggcgtgataagtctttccaagcagatccgtggtaactaacattgcagtggtttcccgaagcaattcgggatcatggatctgaatgtgcactttgcctagtgcaggatttatctcaatatttacacccatctgtgcaactatcttcgcttgggattcgtgacgacttggaaccgcatcgttaagaaatacattgccacccatagccaccggaagaacggcattgcctataaagaaatccttcgccgcatcgccaagcgccataagctcctctttggtgtattcccaccatttcttatctttcacatcaggatgttgatcgtagccgccaagtcccacagcatgcagataacatatggaattgtccggaagaccatccatgaccgtcttcccgtcctctccaacttcatctcttggtttaagcggaagatgctcaaaaaaggtgatgggcacaggctccttattaggatcattgtcacccataaagatattgttgtagtacctgtcatcgcctccagtgatattagagtatccggccatagccgtttcgtgagggaagtgatatggcgtaatacgagtaatttcggaacgaactacaaatcggcctgcaaacaaattatgagcaaatgccccgccctgagccatatttctgaaattcatcggagagagaaataggttatgatcgaccatatatggaccatggcaaacctcaacgaagaggtcctccgaaagactgtcaaaaaatacattacggctgatgcgagtgccctgtgcctgccagtccaaccaaagcgcacggtaacagctatacattatattttcgctgatttgagtatccagggaagcatgcagtttaattcccgctacttcggcaccatgtctgagtcgtttgtggtgaatattataaatacggttctgataaatgtggctgaaggctgctcccatatgacccacaatacctgcctgttcacaatcatgaatcacattacctcgaactgtgtgactgccgatgttatctttatgccagccggagcgtaatgcttgtaaaataacctcctgctcgcgttgagtaccacctttactatgcttctccaaagacttggtgtgccctgtaccgatttcggtacccaggctaataccaacgcatttggattcactgattatattgttttcaataatccagcccttgctccagtgaggtccaatcaaaccttcctggtagtccgtaggtggtgcccattggggggaggcttgacgcagagtgaaaccgcttacggtgatgtagttaattcccggtttcacaggccagaagcaataaggacgtacattaatttctacattttccgtacgaggatcttttccaccaaagttggcccagatttttgttgttgtagaaccaacctcggcataccattttaacaatgaatccttgggatacttggcttcggaccaaacctcaggattgtgaacgctttcaatactatcgcattcatacaatgatttgccatccaaatagacatctccgagatgaattgggaagggcccgtcaaacaaccagtctccactaagctctacctcatagggattgcgaacggaaaagagggaattgggcacttctgtgctccagacatggtttccttcagacttccagttggtaatccgctcagctcctgtaatcacgacttccccgtctcctgcggatcgatatacgattctatgctccgctgttcctccattagcagggttaacccattccctgtatactcccgcatgaacaataactgtatcaccggccatggcttgagccgcagcgcgtgatatggtacgaaggggctgatccgctgttccttttccttgatcattcccatgtatggatacatgatattccataacaactctccttctattttaaaattattgttgtatcccgttattatactagaaaataaatgtaatgggagagataggaaggcgggtgtcaggctaaattgatattgatatgaggtaaaaccacatccactaccctatgaagttgtggatttttgcgtattaaagtcttttagctattgttaaaagctatgactagccatgcttttttcatataacaagcattccttttcatcatgctatactcattagactaaaaagttagaaggagaaatagttatgataccatttcgtaatgatcatgtaggtagctttctacgtcctgcagatttaagtcaggcacgtgaacaatataaatcaggcaacatcacatatgaggaattaagagctgtggaagataaagagattattcgaattattgaaaagcaaaaggaaaatggcgtattggcagttacggatggtgaattccgcagaagctggtggcattttgattttctgggcggcttggatggcgtagagttgtatgagcaaatagacggaccaaaattccataatatgcaaacgcgcaagggcgggattcgtgttgttggtaaagttgatttctcgagtcatccctttgttcaggattttgagtttttgaaaaagcatgcaggtgacgcagtagcgaaacagaccattccaagtcccaacatgcttctatatcgattggaaaatgacgctaatatctatacggaccgagagcaattccttcaggatacgattgcggcgtatcaaaaagcaattcaagccttctatgatgcaggatgtcgatacctgcaattagatgatacagcttgggcagacctattctcagacgctggtcacgataagttacgtgctaaaggtctggaaccagcggaagagttaaaaacgatgcagcggatgattaatgaatccttgtctcataaaccggcggatttagttgtgacgatgcatatttgtcgtggtaactataaatcgaactatttctcaacgggtggttatgactacgcttctgaagttatctttggaggcttaaacgtagacggattattcttagaatttgatgatgagcgttcaggtggtttcgagccattaaaatatgtgaatcgaaaagatttgaaaatcgtgcttggtttactcacatcaaaaacaggcgagttagaggataaagaacacattaaagctcggattgcagaggcggcaacctatgtaccacttgagcaactttgtttgagcccacaatgtggtttttcgtctacagaagaaggcaatattttaacggaagaacaacaatggcgtaaacttcgttatgtgaaggaaattgcagaagaagtttggaattaatccatctaaataacggaggggatccaaaatgacgatccaagcagaccaagagacaattatagttgaagcgttcattaatggtcaaaatgtaaaatccctttcgcaggtagcaaaagagaatccgacaaacccaactgagatcgtaggttatttccctgtcactacgaaagaacaagcggttgaagcgattgaagcagcggcaggagcttttaaaacatggaagcatacctccattgatgaacgcattattatgatgcgcaaggcgatcgataagattagagcggctgagaatgaaattgtacatttgctgtctagagagcatggcaagcccctgtatgacgcacacggtgaaatttatgtttcgttaatgtggatggagtttgcttgtaatgaagctaaatcagctctacaggaagagatcaaagagcatgagaatggtaaaacgattctttcctatgatccaattggtgtggtggctgcgattagtccatggaactatcccattgcgttatctacgattaagatcgctcctgccttacttgcgggtaacaccattgtgcttaaaccaagtccatatgcgccactggcggcagcgaaagtggcagagattattgcgagtgagttcccggctggggtaatcaatgtcgttcatggtgatgcggatgtgggcgttgaactgaccagtaaccctctcgttactaaaatcgcctttacaggtggaaccgcaacagctaagcatattattaaagcggcttcggaaacgattaaggatatgacgcttgagcttggtggtaatgatgcggctatcttcttggaaagttttgatgttcatgatgagcgagcaatgcgccggattgtcatttctaatttcttgacagcaggccagatctgtatgatcgccaaacgtgtgtatgtgcaccgttctatatatgatgagtttgtggaaaaatatatagaggcggctaatcgctggattcgaattggtgacccatttgattcaaatacgacagtaggtccggttaataacctgaagcagaaaaattatgtgcttggtttggttgaagatgcgcaaaagcgtggggctaaggtcatccctctcggtcaaattcttgatcagaagctgtttgaacaaggttactacctacaacctacgcttgtcttgggttgcgatgttcatgatccgattgtagtggaggaacagtttggtcctacggttccgattcttccatttgacgatgaagagcaggttattcatctacacaatgaaagtgtatatggattgacgagttctgtgtgggggaaagaagaggatgccatctccgttgcacgtcaactcgaagctggaacgactatgatcaatacagctgctgtgcaggggctcgatgttcggttccctttcggtggggttaagcaatctggtattggccgtgaatacggcgccgaaggcatccgcacgtatacagaaaaacatgtcatcaacgttccgaagacactggatcttccttatataccagagtaaatggtatagaggttgttcaaaaaggctctaactttgcgctttgtttactgatttttaagaatcagtagacagggcgtttttttgtcagatcagtttgacagtggtgacttttttagagagaaaatacccccacatctgatggaggtgacgctgaagaaataaagaagccactccattgatggagtggcttgatactcagctattatacggtgagcgtcggctattttctacctagtgtctcccaaatttcatggagccaggaatcgaactcagcatctttgtcgccctcgtaagtatcataaatatccagacgtgtcttttgcagtttttccttgaattgctcgaatgtgtgaccttcaggaaggctttttttaatccgtagcaaaattttgttagtacctttaaacagctcacctttgtttttggcaggcatttgtacatcttcatccaactgcttgagcttgtgatatgcggcttcgcgcacttgaaacacttgatcatttttcaaaacatgctgcagcaatttaatggtaggggctgtattccagttccccaattcgttcactgcattcagtctttctctccagctcgacgtccggttagccgatcgtttgagctcttcaaagttctccggtagttcgttaactgctccaatatcatggttgttcgtcaaaattcaatctccttaatcatcgccatctcggcagaatgatgaatgttatttatgtgatcactattatagcacgaacctgactaaactactcctatgaagccgattggttagccctttccttaatgaagtccaccatatacacccaaccaattagtccacataagacaaaaccaaacgcatgcaaagatccataaatgggaataaaatcaagtatggttaaggagtacatatttttcagtaacggatagaagatggaaatgacaataaccgtgtaaaaggctagacaagaaaggcctaaaaagaaggctgccttaatatccaaagcatttttcctcaagtaagtaaggagataagcggtgtaaaccacaatattacaggcgaacaaagtgacaccgacgtattcaattggcttggagaaaatcataccaatagcaatcaatatgggtccgatgatatcgatggcaacgacccaaggataccagcttttcttcgtcatgatgcgtcccagtgcaccaataaaaattggaacgatcgcagatgagaaatgaaagtggagcgagcttaacgcgtgcgttgcaggattagcttggaacaggttcaattggtattgatataaggtaaaccaaatgcccccgataaaaaaataaacgagccccgcaccaatcgctatttcagctgcttttcctttagagattacaatcgtggtcaagccatagatgccaagcagcagtgtgaacagtagccatccaagagacagaatccctgggatttccgtactttctaacccccacatcttattactcattaccgaggccagggtaagaagcgcagcgggaaattgaagccatttcatagcagcataaatcattcgttgatgtttattcttttcatcatggttcaaaagtaaaatcacaagaggtacaatgacaaaagccgcaaaaagcagaaatttttcaacaagttcgaattggaagtaatcaagggaaaatatcagaatggttatgattccaccgggaaacactggtgctaataatgatttcattcgttgtttcaaagaactattcatggggtttcctttctaaccacgtttatcgtaataactacccgtatccagttgtgtagcattctttagtatagattggcaattcttcttttagtagtctaacatatttatttgtaaatatatgaaaataagcttatcttactgcggttgatggagtcatgggaaatagccctttcgctcttcaaagactttcaccataaaggagctgtggtatcaaatgaataaggataaaagtataaaaataaaatactcttcaaaagcaaggaatattctacaacagatcaatagtaaaactaagctaggcgaattacgaaaaatcgcaaaggatattaaaaaagatcacgaactagctatggaactttggtcgaccgaagcgtttttgcccagactattagctattttaattatggataaaaaacttctctcacaagaagtgcttaataagtttgataaggatatgcagactcacacttttgatgagcgaaataacttaatggattggttaatggctaatcagctcactaaagacaagaagaccattgcattgatggagtcatgggaaaatagcccttctgctcttcaaaggcgagctttttggtattatcaagcgcgattgaggtggactggacaaacgcctcctgataacaccgaggacttactatctgcaattgaagctaatattacgcaggaagagccgacagtccagtgggctatgaatttcattgcaggttggataggcatttatgatcaaaagtaccgtgcacgttgtattaaacttggtgagaatacaggtctttataaagatgaaatggtatcaaagggttgtactcctaattatttgccagagttcattgcaattgaagttaacaaacgaaataagaattagttgcccctgaaatattcattagtatctgatgtgaaaataagaattagaagccttaatatggaaaaagggtctggaagtaagcttccagaccctttttgcttggagggcaattgcaaaatttttcttacactactgatcactataattggtgtgaaaccaattttttaactcttcactcatgatctcatattccttctcagcagccttcggatgcaattcgattcctccagaaggtccgaaaataacgatgtctaggctcgtttcgtctgtaaatgtaatttttccagcattgttcgatccaaacacatcacctgcatcaaaaggtctaagttctgcatcttgtatcatttggataaccgtatttttttcttcctcgcttaatatggtgggattaatcataccgatactgatttcttttacttgccctgcatcaagtttctctttaaattgttctgcccatttgctgtccgctccgcttcccgtggagcaacttgaaacgatcagtataaaaccgacaatcaccaagacaatgcctgagatccgtccagtacttagtgctaaatcacttggctccgcatctttaaacttccatcccagtcgaatataccaagcaaagtaaggccaaattgccataattaatcctgttaataagactaaaacacctatgatacctgtcaaacaatcacatcctctatatgttaagtattagtctaatataaaaaacagtaagaacaccactctatttctttcattattctttcatagcgctctgttaatatccatagagggtgatgactctcggatctgatcaaaaagtatgctctggcgttgcctgaatcaaagggatgaaggagagaatacatattgttatcgtttaattggagaaagatggattatcttgttatatgcttcgtattgttgttcagcacaatcgttccatttgatgttcgatcggcttatgctgcaggtcctgcttcacctgttaaagtagagaaaatagacgcaggcggtcttgcttcaatggcgttaaagtcagatgggacgttggtggcctgggggagaaacgactttggtcaactaaacgttcccttaggtttaagtgaagttgtagcaatcgatgttgggtatttccatacacttgcattgaaatcggacggtactgttgtcggctggggtaacaatagcgttggtcaactaaacgtgccagcgggcttgaatgatgtggtggctatcgccacaggaagcaaccattcacttgcgctgaagtcagacaacacgttgatcggctgggggaacaatgccaacggtcaaaccaatgtacccgtggttgtagacggagtagtggcgattgctgctggtaacctccattcgcttgcactgaagtcagatggcacgttggtcgccttgggaggcgataatgttggtcaaactaatgtgcttgtaggcctagacggagtagtggcggttgctgcaggagcatctcactcactagcgctaaagtcagatggcacggtggttgcctggggaggtaataatggtggtcaaaccaatgtgcccgtaggcttagaaggagtagtggcgatcgctgcaggagaagctcattcactagcgctaaagtcagatggcacggtggtcgcctggggggaaaatattagtggtgaaaccgatgtaccaaccgacttagaaggagtagtggcggtcgctgcaggtcatttacattcgcttgccttaaagtcagatggtaccctagttacttggggatataatcaggatggacaaatgaatgtacctgggaatgccaatctgagagatcttaagctagaggaagggaatttcacggaatcctttgatcctgcagtcatggactacacgtattattacgacggtcaatcgctgtccagtgtagatgtaacgccgacaatggcaagcacggaccagacagttatgtacgtaaacaatgagctgctgccggacggcaacaccaagacgatagatatctcgggagcaaccacggatacggtcattcctgttcacgtgaagccctatttgcttccgggtcaaacgtataccattactgtagcaatcgattcaacgtctccagaagtgcagttcggtacgaatggtcgtgttgccgcggcgaaaaccgcagcaagccaagtgaaggtcagcgacatacaaagcggaatagatactgcttcactgcaatatgtgtggacgcaaagtaccgtcgttccgacaggtggctggttgcccttcagcaacagtgataacttgagtcagactagcggaaatggcaactggtacttacacattcgcgcaacagacaacgtagggaatgttacggatgcgatttccaatccttttctactggataacacaatgccggtaccagcaccgaatccaatagatcaagggggtaattcgtctgctccgcctgcagtaacctcatctccatctaaccaggcagctttagctaaaataaatgtttataattccggaaaggctttggaattatctcctaattttacatccaggactatggattatacagtagagacagatgctgagcaggtggagttggaagtaacttcagtccattccaaggcggttgttaagctaaggggagaacgcataagtgagatggcgaccgttcctttggcgatgggtgccaatgtgctgacacttacggttcaagccgaggatggaacgatcaacacgtataccgtaacggttacccgtattaccgatgatgaggataatgcgtcatcagctccggtatgccggctcacggatatcgagaatcactgggcaacatccgaaatttgcgaggcagcagaattgggtattgtggaggggatagatgcctacacctttgtaccaagaggcaacgtaacaagaacggagttcgccgttatgctgatgcggacacttcagatcccgatacataacgaatcaagtgaggtgtctttccgcgatgcagaaagcatcccggcatgggcacacctgacgatccagacagctgtagccgagggaattctgcaaggatatcccgatggaacattacggccgaagcaaacggtaagccgtgcagagatggctgcgatggtctccaaggccatgaagtggaatgctgatcgtacggctaactcttatttctctgataatacaagcattccaacatgggccaaggcatatgtcgaagctgctcaggagcacggacttctgaaagggcaagcgggtaatcgatttgttccggagggacgaacaacaagagccgaagcagcggttgtactcttgcgactttggaaatctatacattaagcaataaaggactgacccctgatgtcattagatgacaacaggggtcagtttttgttgaagcctgataggagatatgcttgtaatccataattccctctactattatggatagaaaaggcataaggtgtctattttcttaatttaaatataaagggacctgatgtatgaattccactgtagaacttatcctgatgattgtttcattgatcatgacgggtatcatcttactcactgtgtacgggtttagacgagagcgcggagtaatctacctcgtaggtttgatcgtatgccgaatgatgtactcaagcagtatcattctggagagacatagcgatgtatttatgactaaattaatttttcgcaatattcagaatacgacccaaaatgtaatggtccctttcttgatcttattcgtttatcacttagtcggtcgagacaagctgctgaagaaccaatggaagatcctactgtttgccgtatttgtatcgtggtcgttgcttatgtggcttgacccaaactttcatattatatatctgacgattgagctttataatggccacctagtcacaacaaaaaccctctattctagagcattcagcctcatttgctatagtgcagtggttatatgcctctactatttatttcagtatgtaaggaatattaggagtgattatcgtaagccgggaatgtgggttctccttctggctacattaccgtttgtcctggagattatcaaatttgtgaagcctgagtggtcatcatggttacttccattaacagtttactgcggatctacagggacaattatgctggtgattattctgaggattaagttcttctctaccgttccgattgccaggaatattgtgctcgatacgttgcaggagagtattgtgattgtgaatggttcgggaaaggtcatcgataacaataatcgagcttcacaatggttctcagagttgggctataccaatatttcgggtcggaatatatcggaaatcctagcttcctggccagaatggtataagctgagcaagtctatgcaaccgggcagtgtagagattgataagtggctggatggagaaagaaaaatatatagtgtaaacgtatatccattatatacactgggtaaggcacagggtaatatttctcttatttttgatattacagagaaacaacggcatctggagcagatggcacagttgaaccagttgaaggatcaactgtttacaattatatcgcatgatattcgcagtccgctagcgctgcagtttcaactcgtggagttactggaggcggacaggcaatccttcgctgcggatcatcaggagatcattgagcagctgggtgaccagattcgtaatacacttggaatggctaataacttgttggagtggtttcgcagtcaggttgaagacatgacacttcgtccagagttactggagctttcggaggttgttgaggactgttgtcatatgttacacattaaaagtgagagtaaacatatcagcgtgatgaataagattgctataggcacccatgtatatgcagaccgggaaacagttggtttaattattcgcaacttattaaccaacgccatcaaattttccgaattgggtggtttaatcgaagtgtacgctcagttgtcaggagacatggtgatcgtgtccgttcgtgataacggagtaggtatggaagaggagcgagttcgtcagctatttaacgagaagcaactcaactccatggcgggtacattaggtgaaaaaggggcagggcttggactgctcgtaagtcggcagttcgtacaactaagtggtggagatatgtgggcagaaagcacggtgcaacaaggaagcgtatttcacttcactttgagaggcggaacagagagatgaaagtactcatcgttgatgatgagcctgccatgctgttggcaatgaagcggatgctgtcgagtatgcaagatgtggagattgtcggaagctttcagaatgcggcagaggcactcgatttcgttaagaacagggaagtggatctcgcattcctggacatccagatcgctacggacaatggattagagcttgcacgcagcttgatctcagtttgtaatgatcttgacattgtgtttaccacttcgcatgcagaatatgcgattcacgcttacgatgtttatccgttggactacatggttaagccgatttccagaatgcgactggctcagacgctcactagggcggccagcagacgcagatcttcttctaatcttgctgacgaccttgtgcctaatcggctgacggttcatggactgagttgcttcgaggctagcagcaagcaagcgggtacagtgaaatggaaatccaaaaaaagcatggagctatttgcctatctgcttgttcaacagggtagaagtgtagccaaatcccgaatcctggaggatctcttcccagggaggcctctcaagcaggcggaagtgtacttgaatacgattgtctatcagcttagaaaggtgttatccgagcatgggttcaaggagatgatcctatcagcgcaagagcaatatcgggtagatttagatcaagccgatgttgattttattcgattcgaacagaccatgttggagttatttgaattcaatatagctaatgaaaaagcggccatagcgttagagaaacagttcgtaggcgagttgtttgagggtaaatcttttgattgggcgacaggggaacgtgagagattgttaattgtgtacgtttcctatgccaagcgtcttgcaagctggttgctggaacggaatcaatataatgaagcagcacgcattgccagaagaattgtatcccgcaatgagtttgaggaagagtcaatattgctgttgttaagtatattgggagccatgggagatcgaaaatcactacataaacactatgagcaatatacggaattactgcttcatgaacttggattacagccttcgctgtctattcaacagcaatatgaacaatatcaatgatatccttctgataaacaaaaaaagagccgcgcatcatgcagctctctatctgattttaacgcccgcccgtattggaagcccagacaggaatccaactgttcggataattgctattggtcagggttgtgttatagagaactaaattcccatcactttgcatgaccagtgtatcacctgttgtgttagcaggtaagctgctcccgtgatgacctggaatccatgaggtggtattgggagaccaggcagctacctgtacagaagtatcaatcatcaaaactttatcccatccccaaccggtgtaatattcgaatttacctgtagccgggttgaaaccataacgataaccatattggtaaacgtcttgatatttcatgccatatttatacatgacaggtttcccgtactgtgattcaaaattgaacgaaagagccccactgttactagttccgctactccagagagaagaaccgttttgatagataacaaagttcccgtcattttgccagatggctgagaacctgccatcttgggaggtgagatagtcaccctttgccatgctttggccgatcgtgagtttatctccaagatagccagcagaagctgttgctggtacggcaaatgcaagaatcaacaagcaagccataagaactcgaaaagatctgggaaaaagtcgtttgttcattggacacgctcctatttttcttataatggttaaagttaaatgcatagaacaacaaatccttacagctattgcatgtttctgcgttgtattcagtcaggagcggtgaggtaacacgtccccatctggtgtaaaatgggaactaagatctaaaatgctcccaacggtcacctcctttaatagaagtgtgaaaatctttgatacatattatgtaatgggatgtgtgtgttttaggagatggaagctaagtgttttttagtagaggagttatatcatcaagtgaaaatgcatactttattttccattatagcaacaaaaaatataaaagccatatttttctatatgaaattttgaatctattacttacaaccaatgcgttataacttctcgtctcctgagctagaaaaaaacctgttattcgattgaataaattgaagctaaacactaattttggtgcagatcgagatataggtattcatctcctctatcaatctctcaactttttacacccattttatatatttaatgatttttatgaattgaactatggtaaaatatctcaggatctaaaattggagaggggttttttcattcatgttttggaaaaaagttttgggtaaaagcacactgcgtgtagctaccgctgcactattactcacgcaactattgggcgcagcaggttctgtctctgccgcaggtaacgatgtagaagtacacttgattggaatcaatgatttccacggtcagttagataccacatcaatcgtgggtgataagaaggcaggaacggctccaattctagcaacctatctcaaagaagctcaagccaaatatgaacactccctactcttccataatggagactctgttggtgcatctgctccagcctcatctttggatcgtgacgagcctaccatggaatggatgaatatgatgggcttcgatgtagggtccttagggaatcacgaattcgaccaaggtgtcgctgctttaaaggcacagatctttggtggccttgatccaaaagaaggtaaggtaacgcatgccggtgcaaaatttgattacgtcaatgcaaacgtgattgaaactgccacaggaaaaacattgattaagccgtatgtgattaaagaagtgggcggagtcaaaattggatttatcggactagtgacgaaatcaacacctgccaaagtatctccatctgggacagctggcgtacgtttcttaagcgcagaagaagaagtggaagccgttaataaatatgctaaagaattgcaagaccaaggtgtagaaacgatcattgttttggcacatgatccagcaacaaccaaagaaggcgtaaccactggagaagcagctgatctggcaaaagctttaccagcggactccccagttgacgttatcgttgcaggtgacaatcatgctttggctaacggtgaagtgaatggaaagttgatcgttcaagcttattcctatggtacggcgtttgaagatatcaaactgatgattgaccctgccaccggggatgtaactgaaaaatcagcgactgttacaacgactttccaagagggtgtaaaagaagaccctgaatctttagctattattaaaaaatcattagacaagcatcctgagctgacgaagccagtaggtacaacggatggttctgttacccgtacagatgcttataataacgaagcccctctaggtaacctcattgcagattcaatgcgtgaagcagactttggggataaggcaagtgctgctgactttgcatttatgaatccaggcggtattcgtgcggatctgccacaaggcgatgtgacctttgctgatcttgccaaaatccaaccgtttggtaatactctagtaaaacttgagctgactggcgaacaggttaaaaccttgttgcagcagcaatggggtaccaatgctgacggtacacctaataccaaaacactccaaatctctggtttgaaatacactgcagatttcaataagccggtcgcagaacgcgtgactggtctcagtcttgaagatggaacaacgattgatcctgcaaaaacatatacggctgtagttaacaactttatggctgcaggtggagataactataaagtgctgctggatgctaaatcatccctggcaggtcctatcgatctggatgtattctaccaatacatcgtagacacgtataaaggtggtagcatcgaagctaaaaatgaaggacgtatcacaaacctggctgcatctaccgagccaacagaaacacctgtaacaacagaagtcatttctcgtgctgaatttgtaagtgctctggtcgacatgttgaaacttaacgaagtagctacagcacctgcattcaaggatgttgccgctaatgctgcatatgcagatgcgattgctgaagctacgcatgctggattcattcaaggttacggtggaaacttctatcctgatcgggatatcacgcgtgaagaagctgctaccattcttgctaaattggtaaaagatcaagcgactgataaagacgctgctacgattattgctagtttcgaagatggtaaatacgtgtctgcctatgcaatcaaacctatggcaaaactgattgacaaaggtatttttgctggaacagataaaaaatcacttcaacctaaactaggtctgactactaacgatgcaaaagcattaattgaaaaagctgttgcagcaaaagcttcataatgtagaacttattcaaactttatattaaaacagagaaacacatcctatcgaatgagcattactctacggataaaccctctcatcaagtagttctttaattggtgaaaagggtttatccaggagaatgccatatcccaatttaggatgttttttttatgcttaaaatccacgattctatggagaaatctatgtctgaattggctctatggtttggttaccgtttagtgttcagaatttggtaagggctctaaagtaaaatggtaaggcaagccatatgaacttgatgaattttatcagtttctgttgtaaggatggaatggccaaaggaaagggaaaaagtttctggttgctgcaaaaattttagaagtggaggagattttcgtttgaaacaaaaacgcaatataggtaaaccgttattgtctttatttctggcaatgttgctcgtcttgcagacagtgatatactccaccgccgcatatgcggagagtgtgccaaccgattccggaatggaagcggtcattgaatctgactcaccgagtgccgacgaaccactttcggtacctgaggcagtgtacgatgcaccgaataatttcgtagcgatggtggcagtcccaacggacaaaacagcggtatttatggaatccaattcaacctttccgctggaagtgacacaggggaatgctgttattaatccgaacggtattattcagggtagacagccctttacgctcaaatcggaaggtctcaaggtaccagtgaatggtgatgacccaaatccaactaatgcagatcctgagaaatacatccaaaagggtgactggatcgagctgaaaagagaagattacttcaaggaagtggtgctgccaacagctactaaaaccttgaatgcacagacggaatcaggtacaaaacagctgggcaccgcctatttcactccaaatagcatcaagattgtatttaacggtgaagataattttttcaatggtgttggacgaggtatcgtcttcagctttgaatctactgccaatgcagatataacgggactagcgtatggcgataaaaagccgatcaacatctttggtggtgcatatcagcttgagaacccagatgttacagcagagtataatattactttaagctcgcctggaatgatcaaatgggatcagtatagctatcgcggaattcaaccagcacaatttgttgagggagctgttacctggcagtcaaccgtatctgcgtttgatcagtttgataaaacaatcaaattgccactagacggaaagacattttggtataataccagctctggaaatgcccgcggcacctatatggaggaatcatttaaagtaaatgaccaaaatgtaactccagtcgttggtccagacggatcgctgacttacatttttccacagggaacaggtctagatccaaaggttgaatataaaacatggatttcaaaggaagcttattattacgagtatcggaatccgccagctaatctcggtcgcagccaccgggttatgaatggcagagtggaactgagaaaagacaatgatctattggttcattcaggtttggagatttcctttgctcccgactggattcaagccagcgcttcgtatgaccatgcgaatgaaaccattacatggaagatcgcggttaaccaatataataaaaaagggttaaaggactttaccatcacaaatgtattaccggctgggctggaatttgaatcggctgcatggcagacatgggtagatggcgctgtatctgaagaaacgccaattacaccagattcaaacggcgtgtattccttcggggatattaacggaaaagtcgaattgttgattaaaagcaaggcaataagtggttccagcttccaaattgaccctcgtgccaactggaatttggatacaccaggtgttatacagaacaacgatgtaatgacgggtaaaagacctattgcggtgacagatgaggcagtcgtcagcattggcgcacacacgtttacaaaaacaggcgcagtatcaaccgaggattataacctgggcagtatcacgtggaccgttaatctagcaccacagtatgccttacctaacgcggtagtatacgatgtccttgtgcatggcggtgacttgaacgtcttggacaacgctgtagatgaaaccagcgaggtgagtgcggagacaattgcgaaaattaaagcaaatatcacttctgcgcagctttggaagcagtacaaagcgggaactctgaagtcgaatgcaaccggattgacgatgaaagctattccattaaccgtggacggtaaagtggtggcggatttgatcaaggtgaccggatacaccgaagaagcggcatccttcagcttccgtgcacttgagaccaacccgaacattctcttcagacaggatattaacgcagggaaaactgtttcgaatcgggctttgctcattgatggcgaaaccgtaaaaaaagcagataacagcgccaacctacacatgcatatgttgaacaaggatatgctctttgcttcgaggccattaaaagtagatggtacttttgaaaatgtgacgccgaataacgttagcagttacattagaaatgataatgaagcatggacaatttctggctatgataggacaaccaaaacggtcacattccgtttaggggttaatatgcctggatacaacacagaagaaatggctaaggatggcggtaatcgagtcattagtaatattaagctagtggatacacttcccgaaggctgggaattcgttcctttctctgaaactaaggattttgagctttggaaaggattttcggacaatggtgcaggaacagaatatggtgttagaaacgatgctagaactctaattgaaccaggtactagttctcatgtagtccatttttcacacattggaaacgagggtactttcaccttctccaagttggaaagtccttatatcattctggtgaaggcaagaccttccaacgatgctctgcagaagtatttagaggaatacaccatcaacggcacggacaaacaggtgctgtataacaaagccgaccttcatatgtcatggggtggagtggagaaggttgtcaccgaacagcgcaaagttattgtacctattcagacccttggaaagtcggtaactaagccagttccaggagtgctggaatggacggtgaactataccccgccatttaacatgaagcagggtgtttatttgcaggacaccttgggtgcaggcatgaatttgcgttatgaagaaaacggaaagcttgtgctgacatcacctagtatggcagtctatcctgctaaattgaccgcaagcggcactcttgaacgagagggcgcagcactggacctcagcgacccgaatgctgaagttcaagtagaagctgcaccaggcacgggtggcgctacggttctaacatttaaaatggacgaccctaatcagctttaccagtttgtgtaccaaacagaagttgatccatctaaagcgaaagctggagacacaatgggcaacgaggtaaaactggagggcgatgacaatctgaaatctgtcagtgccagaagcgaaagcacgctggacagttcggacgtggccggcagttcaagttccaatgctctgttgcctctgaaaaaggtagatcccaatggcaatccgctaaaagacgtagagtttacactctataagaaagacggcggaactataatcaccaaaggaaaaaccgatagcggagggaaacttaatctgctattccctgatccagggtattatgagctgaaagaaacttatattgacaccaatacttggctaccaactacaagagtataccaagtatatgtagggaatacgccagggaagcccatttgggttgacggggtgaaattaacctctgataatccactgatcgtgcctacaccggcccaaggcaagctgaccattaccaataaggtggaaggcaacggcagtgatccggacaaagagttcgagtacaccgtgaccatcaccggcgaaggtaaggacagagagtatacctataagaagtcggatgatacgtttggcacgatcaagagcggaggcaagattacccttaagcacggggaatctgtgacgttcccagccttgcctgcggatctggtctataccgtaaccgaggctgattatacatccgttgatggttatacgacgacaccgggtacgagggagctgtctggctcaatcgtgaataaaggtgatcacaaggcggacttcatcaatgaacggaccgttaacaagctgaccatcagcaatacggtcatgggcaacgggggcgataaaacgaaggagttcgagtacaccgtcaactttgaggatacaggcaaagaggaaagttactcttacttgaagacggacggcagcacaggttcgatcaagtccggcggtaaattccgccttaaggatggagaggcactggatattttgggtctgcctaagaatctgaaatacacagttacccaacaagattacacaaccgatgaatacatgactactcctgaagaacggtactataccggggtcatgaaaggcattgatgaagatgccccattcacgaacgtgcgagtcttgaagggcggcctattaatcagcaacacagttaaaggcaaagatgaagacaagaagaagctgtttaagtacacggttgccttcaccggcgagggatcggacgaatcctacgtctatgagaaatcagacggcagcaagggtatgatcaagagcggtgagagctttgagcttacagatggccagacgctcattgtccaagggcttccaaccaatcttcagtacaaagtgacccaagatgattatacggaagatggctatgtgactgatccagagagtctcattcacatgggcactattccagagaaaaaattatctgaagcacattttgccaatacccgaccgtatctggaaggcgtgttgcgtaacaataacacaggagaagtcattccgaatgcaccgattacggtaactgatctgaagacaggcgaagagattcagacgcagacgaacgagaagggtgaatattcaattccagccgtagcggataccgattatacgatcagatatacgaaattgtatcgggtaggcggtaaggatgtacctgttgaatttacgcagaaagcaaaagtgaacagcagtgtaacggacgagactgttccagcggacattacggccgtggggatcattctgttcaaacaactggatggaacaacagtgctattcaatgatttgttgactagccagatgcatatctatttgaaagacaaggatggcatttatgttaaggaaaacggccaacctaaagcatttcctatggcttcgaatggaacgttctctgtggaagggctaagcgagcagaagtacacaatggaagttcgctatcaagctgagaccggcgaggaattgctcctcaaagtggcgcaacttgacgttaaagctaacggagagctgaatatttcagaggagttagtcgacccttacggtacggtctatgatgaaacgacaggagatgccgtcactggcaagaaaattgatggagccaaagttacactgtattatgcggatacgcagcggaatagagataacggccgcattccgggtacgaaagtaacgcttccaaaggttccaaatttcccgccgtacgacaacgagagcccggagcagagtagtgatgcagatggcttctatgcgtacatggtgtttcctgaagcggattactatctgatcgtaacgaaagacggatacgaaacgcacacaagtagtaccatttcagtcgattttgacattgtcaggtacgatgtgccaatgaagccaattagttctggtggcggcaatggcggcaatggtaacaacggaggcggcaccgtaacgcctggtccaggcaccgtaacgccagatccgggcacggtaacgccagatccgggcaccgtaacgcctgacccaggcacggtaacgccagatccgggcacggtaacgccagatccgggcaccgtaacgcctgacccaggcacggtaacgcctgacccaggcacggtaacgccagatccaggtaccgtaacgcctgacccaggcacggtaacgccagatccaggcaccgtaacgcctgacccaggcactgtaacgcctgaaccaggcaatggtaacgatcagcttaagaacgatagcaacgagttggacgatgctccgaaaactggagataacagtgtatcgccattcttgtatatggttttggcgctgatgtccctaatgacgatcgggttctgtctgctcgggtacaagaagaaaaagcacatccagtaatggaagggaaggcggtaagaaaatgagcaaaactaaaaaaattcttatcgctgtttccttgcttgtgttggtgttttcacttgtcagtcttgcgaggactttcttgcgagattatgccgagaagcagaaaatcgaagagttaacaaaggtttggacagaaggatcagaacaaggtggaggggatgcaatcccctccaccttgttcaataaaggcaatgagccggttatgcttcccgaatttcgagatctttacgagagtaactcagacatcgtcggctggctgaagattgacggtacccgaattgagtacccagtcatgcagagcccacaggattcggagtactatctcaatcatgatttcgatagaaaagaaaaccaaggtggtcttccttttttggacgagtctagccgggctaatagttcggacattttgctgattcatggacatcacatgaaaagtggttggatgtttaaagatttaatgaagtacatgggtgaaagcttttataaagagcatgcgacgttccagttcagcacgctttacgaaaaggaagagtatgagattgttgccgttattctgtcaaaagtttatcgcaaatcggacgacgtgtttaaatactaccagattgagaatgtaagtacgcccgccgagttcgattcatatgttcagaatatcaaacaacgctctctttatgacacaggtgtaacagcacagtatggtgacaagcttattgtgctgtccacatgcgagtattcgaccgaaaacggtaggctagcagtggtagcccgaaagcgttaattgacgatgctgaaagacaaaatcaatctgctttatttcgcgttctctccttagaggacgcgatttttcttgtccccgaaataaggtgctcatggacatgtggcttgaggaattacgcagatcgataaattctgacgaatccaacgagtatcgaggatgtatacatttgagatgaggacatgaaggccactccatcgttggggtggtctctatgctgatcaacgacgcggactggaaggagacgcttttgatcatattatggggttaaatcgacaaatctatgtttctatgatagggttgaagcatcccataggcattctactcttcggagtagagtgccttcatgtatattatgggtgcttacattaaatgtattttaaaatcaattggatcgtatatggaggtggtgatgctatgtttctctctttagccccaacaggggatggttggatgagtatgaaaaatgtgaaaatatcatttaataaagaggagcgaacatagcatgactactagttttcaggcggagacccgcattccattaaatacatcccgacttagggatttacgtaaatccgggcgtttgccaggtattgtgtttggcaaaaatacggagaatgaaatgattcatattccaacaatacaatttcaaaaatggttgaagcagggtacgtctggttttatcgaactgcagtttgaagagaaaggctcattgacggtattgttggaagatctccagcgtgatccagttacacgggatttacttcatgtggattttcagcaggtccagaccaatgagatcctgcgtactaaaattcctgtgaagttcaacggcacaccgatcggtacaaaacagggtggagtcgtgcaagttcaattatcttctattgaagtggaggcattgccgagacacttgccaacgtcgattgaatttgacattagtactatggaacttggagaaacgctacatgtaagtgatgcaacgtttgctccagatgtgacggtgatctctgaggggaatgagtctcttctctctgtagttaaaccttaacaattccaaatttttaaagctgaataattcaaaattagccgtacgggtgatattccgtacggctaatttgtgctgattacgagatgttggcgtgctcccatccttataaggcgggtagtctggaattcacctcacgtatgtcttttgctcgcgtacaggcgcaatgatcctgatatttcgctaccttttcaaagttcatacgcaaaattcaggtgtaaagtaggtagactcaggaaaggtaatcactataatggaaataagatacatatatagttgaatccgaactgctaaggtcaatggcataacatttctaaacagggcggtgagcgaaaagaaatggacaaattaaagaatagcggattctataaactgagattcttcatcactcctgaagagtttaaaagccttttgcagcttttggagcatcggcaagcgcaattctatcgtaccaatgctgcccgaacagagcatgattataatcaggtgtacgaggagtatcagacgttctatcagtattttgtggcaggagaaaagagagatgacatccatcccttctttgtttactctatttctattgcatcagatcaagaaagttcaggattttttgtgagaaatgaaggggtttcttttccatatcacggacaatgggcagaggatgaactgccgtgtatcttgctttcatttccgaaaggttttcaagttaacttggaagatgaaaaaggaaaatactatatatatgaggatatccgggaccataagccgctgacctatgcatttttcgatgaaataagagactctatcaaaaaaatgactaaactccttcgcttctcagcccttgatgcagatgcgatgaaggagcaaaagccctctgtgcgtataagccatgatgcaatgcacgaattgagccaatcgtggatcttcagtaaatatagacttgtgattcatggcaaataggagggggacgaaatgatgttcgccctaaagcttatctgtacctgggtactgctagtcgcctcatgttccgcagtatggtggagtttcagaacagaaaagcttataaccatctcctggctggcatttttgctaccggctgtcttccagcttgttaccgctctccggattggtccaggccaagcaaagtcactcatcgtgttcggctgtatcaatctggtgtttgctgcccttgtgggtgcaggtgtctggtatctagtccaaatagccaattcatatcgaaggggcaaatgatcaacgaatgaaaaggggaactctaatcatgaagccaatgcaagaaatagagacactggccatagagatcgctgctgccgccagaaagtctttttgcaccctttttgaaaatggtgaacgttactattattgtacgttatacactactggcgaaggacatgcgccaagcatttctgcatggtcgtgggaagctttggcgttggaatcggctagacaagcagaggaaagtgatacgccggtatccacgattgcggatctcatcaaatggtcgtatgcggattcgccctattgttgttttggggatgatcactttgacgatgtcaaacaacgatataaggagcgtcctttcattgcggaactgaagaatggtgattggaatcgcgagttggatgtgaggctgaacgctatggagctggcgatgaaaatgctcgatgatgaaggcgtatttgccttaaatcaaccgcgagagtccgtatgtgtccttgttgaagtcatgccaccagatgagatcaataccgaaattgccttacgtttgaatcgggcggaatctccggctatgcaagcatggttggcggaggcggcagaatagaagcatctgcaatttagggagttttgaccttctatttgaccgtctataatgtaccgtttcgactcaattggccaataagatgatactaacagcagatctataattcgcgaaccacctttgcatagtaaagggtggttttttgtgtttgagttatgacatcaagctactagttttcctctaccactgtacaaacacactttttctgccttgtccacatttatacctcaccaaaactatttaattgcatctaatagattatcaataaaaaggaggttttgagaatgggaaatagaagacctggagcacctagtggttatgaccctgttcagatctataactcgacttcgtttaatgcgagtggagtagtggagtatgcatcgattttttgtagcaacgatagatatagtgttcagcgtgacgagacttggagatcttccgaccgtggtgtgtgcctggtaactagaatcaccgcgacggttagaacaccgagtggaaatattgaggctgaaccgtatacctcttctggtacttcgtacagccagttcgccattatacaggtaggggtaaatcagttccgagtgacacgtgttacaagtgcgattagaaaatgccggaaataaccgaagagggttaatatcgagattaggcacgaaacatgaagagacgacttgccgggctagcaggcaggtcgtcttttttcgttttaatgttctttgtaccataatattctgcggtgcatcgaggaatctttcaaaagtcggaaaggccgtagggctggttgataattgccttcgataatccaaattcgccgtttcttgtcgatggctatatcgaacccgacttgtctaagcatagggtaatgctctcccaatcgtttggcagctaatcgtgcaacttgttccgctctgacaagtaagcgccgatctccaattcgagctagtctcagtgctttaaaaacgggaatggggcggttattcacattggtgacttggtatccttgtgcagcgactttagcataggaacctgtcacgttccaagtggacgaggaatcctttttgcgctgaaccatgatccgaatgtcgaacggcctgtgtttaatttgagcaagctgcagacgcttttggacaatatattcatcacttttgattgtttgttcgaaccattcgagtaactgctcgttgtctctcatggtgactatgttattttcattttgaatacgataagcatttgcaccgcttcgtttaatgaacaggataccccttccgtaactgccattacgaggtttcagtacaacgctgggatactgaagaagcatctttgttaacgtatccttctcaagcaactgtgtttctggcaaacgttcagcgagagagggctcatcgcgcagaatgccatactgcaaccatttgtctctttcgaataacattggaatcacagcctttttcaatcgtctacggtaattctaattcaaattcgtgatccgcataagtggccattcgtccagatttgtaagtcgatgcatgtccaatcggtcgatggagacagaagatgaacttttgcgagaaatgactgcattctggggcggtgttcattcacgcttcgagtggcttctggatacgcaggcgcacttctatcaccaccttggataacggcatggcgtgctggtacatgtactgaaacaagagccaaatgtgaaatggtttgagtagtactagactaaccctcaactagtatttttcgcctatgaactaacttataaaagagtgcaacttttttaccaatatatatacaagttattcgtttactgtatgccttttcgatgttatactcacaatattcaaaaaagaatctgtgaaaatatgtcgaattgaggcttaccaggatgattataggtagacaaaacggcgaaacgatcatcctcattccatcgcttgaaccggatgagagacttccagcctatgtacggcaattgcgagagtatggatttactaatattgttattgtagacgacggatctggtgaggcctaccagtcgattttcgaggagcttcgtgagaacggttgtgctctgctgacacatacggaaaatcaggggaagggtgcggcactcaagaccggatttgagtatattgggaagcaattcgacgtatcttccttcgtcgtaaccgctgattcagacggacaacacgcagctgaggatgtataccgcatagcccaggaagcaaggatttatccggactcattggtgctcggggtaaggaatttcagcgaggggaacatacctccaaagtccctgttaggcaatcgaatgacctcctttatttttgccatgctctatggtaaaaaactgtcagatacccagactgggcttcgtgccttcggtccagggttacttgcgtttatgcaggatgttcgcggcactcgatttgaatatgagctgcagatgctcatctcgtgcattcagtctggcataccgattcatacgatgccaatccaagtcatttatgagaatggcaatgcaggcactcattttaaagcgatccaggatagtgctcgggtcatgggggtgttgttctccaatttcctgcggttcatttcatcatcggtggccagttctgttgtggatttaggcatcgcctggtttttgatcgacgcgttgcggcccgtgttgggtgagcagcactatttaagaattctgcttgcaaccgtgattgcgagagtgatttccattgtggtcaactatgtactgaacagacactttgtattccgcaaggaggatagccagggcagtctatggcgctatctaacgttatgcggagtagtgatcttgctgtccagtaccggtgtatatatattccataccgttctcttcgtagatgagaaattggcgaaattcgtctgtgatgccttgctgttcctgctcagtttccaattgcagcgaagatgggtatttgcagcaaggaggaagcagttgtagtgcaaaacgaaaaaaggcagaatatcttttttgtcatcacgatgatcctgatgtcgatttatttggtatggcgtacgttctttacgttgccatggggtgagggcgttctgaacgtcatttttggtatgctgttgattgttgctgaaacggtcaccgtactgacaacctttgaattattctttcaaaaaatgcaaaaagaacgtacacagctcgactttcccatcgttccgccggagtattatccggatgtggatgtatttattgctacgcataatgagcctgttgatctgttatataaaaccgttaatgcctgtacgttcatggattacccagacaagcagaaggttcatatctatctctgtgacgatggagcaagacctgaggtggaggagcttgccagacagtttggcgtggggtatctggggttccccggaaacaaggatgccaagtctggtaatctgaacaatgcattgagcaaaagctcttcgccgctcattgcaacgtttgatgccgatatgattccacaacacacctttttgatgaaaacggtaccctatttcatgctctccacgtttattaaggagaatgaggtatggcgtcctcgccgagaggacgagatggaccctaagttcaagcttggtctggtacagaccccgcaaagcttctacaatccggatctattccagtttaacctgtatgcagagcaaggtattccgaatgaacaggatttcttctccagagaagtgaacatcctgcgtaatgcctccaatgcggtagcctatacaggaagtaatacgatcatttcccggcagggcatggaagacatcggaggttttccactcaatacaatcaccgaggactttgagacaagcatccgcttgcagcaggaaggttatattacctatgcgactcaagaagttcaagctgccgggcagacaacaacaacagtgaagagcatgattaaacaacggattcgttgggcacggggtatcattcagagcctgcagaatacgcgtgcacccttgtctggtaagcttcctttctggacgagagtgacctacttaagcagtttcttatactggtggtccttctttaatcggttgattttcatcttggcacctattttgtttgcgttattcgacttccagattgtgaacacaaccttctggcaaatcctaatattctggcttccatcttatttcttctatagtgtatccatgcgatatctgtccagcaatattcggaatcagcgctggagtcaggttatcgataccatattcatgccttatctgatctggccggttctactggagacgctgggtattcgtgagaaaaaattcaaagtcaccaacaaaagcagagcaagcggtcgacaatggatgtctgctctgttatatgcacttccgcatatcttcttgctgttgctttccattgcagccgtgattcggtatgtgaatggcaagtacggcattgcgctgttcttcagcagtattattattttctggctgattcataacatgattgcgctgtgttacgccctgttcttcatggttggccgccgtgcgtaccgggagacagaacggattcgggcgcaggaagatgtcacgattcacgaccaagccaacaatctgcgttatcaggctaagacggtggatgtatctgagcaaggtattgccttctatgtcccatatcccatttatttggctgagcagaaaatcatctctctggttgtcaaaaccgatcggtatgaggccaatctcgatgcagtcatcgtttatgtgaaacaggatggagagggctggcgttactccgcaacggttcagccgattgatgagaatgataaccgccaatacatgcaaatcatctacgaccgtaaacactcgttgccagagcagatgaatctgtgggatacggcttatgacgatatgttacgtaatgtgaaaaaacggattgttcaacccagatcggatcagcgaaaaatgccgcggctttcccttcagcttccagttcatttcaccaatgatgctagctgtacgctgcgcagcttcaattatcgtttcttctccgcgacgggtttccatggtgatattgcggcaggagcggtcgttactttttatacgaagagtaatattgaagtcattttgcaacatacgggaaaaacgacagctcgtgagcgcgaagtgcttctctcggtggagaatatcgatgatattgtggagaagggcctgatcgaccaattgttgactgatttgattgagccacattccgatcgttccaccagagagggttaggagagataaagatgctcattgtgcttcattttgtgatgggagttttattgatattctcctttcttggttatatgcagtttgtacggaaggcactttcactacgttgggagttcatccctgtatttgtgttttcctcgattgcctgccttgttttcataagtggtttggcagggcagctctttacgggcagccttgtcatcctgattgcaggtttgcttttatatgggggaatgttgtttctcaggctgcgccgaggggcatcattacggttgtccttttccatattccaattttcattcctggcagggactttcattttcttgctggtgctctttcagaaccaattaacacattacgataatttctcacactgggctatcgtattgaagcagatgttgagtacagatgcctttccgacgccagactccaacctgattgattttaaaaactatccgctggggacttcgtcttttatttattatgtctgtcgcttcatggggcattcccagtccgtgatgctcttggcacagggattgcttatcttctcctgtttttatgccatgtttggcatcgtttcggagaagaaacgctttcttctatacgcttttctcggactcgggttatctacactttcgtttttcaatcttacgattcggatcaccaatctgctcgtggatttcttgcttccgatctacgcgctcgcaatcctggcggtgatttaccaatatcgtaatgagatcaaaaaagcatgtattgttgttcttccgcttgcgggattactgaccattatcaaaagcacgggtattattttcgccgcgatcggtctgatattcctagtgtatacatggctaaaacataaacaaaagttcagttggaaaacagcgctcgctgtagtaggtacgatctgcggtgcgctgattccctacttcggctggagctggcgaatggcaacggtgttccaagggattgataacaagttcgatgtggctacctcggggattcaagccggcaaaacgccagagcagatgcgtgagattctgtggactttcctcaagggcagtacggatctgacgacacggccagtgatcggcattgttattttccagattatagcaattgcagtatctgtatttgccatcgttgtgcttaagaagaagtggaatttgtggaaagcattaattgcactggacgttgttctgttactgtactatgcgggtattctggcgttgtatctcttctccatgccattggatgaagcaattgtcctggcaggatttgagcgttatgcgtccagtatcgtggtgctattcgccggtgggctggtgttgtgcgctgcgatcgatctggagcgctcattccactatcggatcggtgaagtgcctgattatcaatcttttaagacggttgagacaaaaggtcattatcaaaaaggcattatcggctgtatggcggttgcggccaccatccttttgtccgaatataatggtattgtgtctatcgcccaaagttatgatacaacgctcccttacaagattcatgcggttactggtgatcggtggtactcaggtggacaagaggataataacagatatctcttctacggttcagacagggaccaacaggtcacgaactattacatgcaatatgtagggaagtatttcttgtatgctcctcatgtggacgggattgtattgttctatgaggataatatggataaccttctaagcggctatgattatctagtggtcgtcgagaccgatctcaacgccaattggttgctgaaaaagcattatggcatcgacatgcaagaggggatctacaaaatcacccgtgccggggatcagatcgttcttactttgacgtgagatcataattgttgagatcctgttctgagcatcaggtcaggatagatggaatacatgattgtatatagagtctccttaaatatagcccgctatagctaatacctatagcgggctataactctttcgtagaacagctattccgatcggatatgttatatttaaacctataatgataaacggggagattaaactatgagcgtacaaacagaacctaaacaacgaacagtcactccatttcgatatgatattgtgggcagtttcctgcgcccgagtgcgttgaaagatgcccgattaaaataccagaacggcgaaattaccacggaacagttgaatgaagtggagaatgccgagattgtgaaacttgtacagaagcaaaaagaggttggacttcaggctgtaacggacggcgaattccgccgctcttggtggcatctggacttcttctggggactggatggtgtagagcggacaattattgaggaaggctaccgattcaacggtgcgacatccagaccggaaacagctcgtctgagcggcaaaatcagctatagcagtcatccatttgtagcgcattatgccttcttgaaagaagcagctggggaagacgttgttgcccgtcagtccattccagcagcagcccagttcctattcgaattggaccgggcagataataaggaaagcacacaggccatctatccgaaccgccaagagcttctctcggacattgctggggcgtacaaagcatccatcctggctttttatgaagccggctgccgcagcatccagattgatgattgcacgtggggtgcattgtgtgaccaacagttcatcacagtgatggagcagattggcgttaatgtggaagagtacgcaaacgaactcgcaaaactaaacgaagatgtggtatctggcctgccggaagacctcgtggtaaccactcatgtctgccgcggtaattatgtttcgacatttgcaggagtcggtggcggttatgagccgattgcgcagacacttctgagcatcgataactactctggtttctatctggagtttgatacggaacgagctggtgacttcaagccgcttcgtttcctgaaggacaatcagcaggttgtacttggcctcttctcttccaaattcggagagttggagaacaaggaagatatcctgaaacggattgaggaagctacacaatatgttgatctggatcgaatctgcctgagcccgcaatgcggcttcgcttccacggaagaaggcaaccatctgaccgaggaacagcaatggcgcaagcttgccttcattaaggaaattgctgaagagctctggaagtaactttttcaacgtcattcatcattcacgcatgtgttatgtataagaaaaaatcgctaaaaagccgtacggaccatcttccgtatggctttttggtgtatcctcacttttgagtggatgtttgatcagaacccatatcagccaagagagtgaagccatgggtagagatgagaataacggatcagggaagcggcatgactgaggaagaggtgtggtggacgaaataaaatagcgacagttaggacaaagggatctttgtcgcgactgccgctatttgtctatctcgcatgaaatcgccctttaggcaccaccatcggtgatcccgaaacggggtcttctatgaccgtacattccaatccgaaaatgtctttgacctgtggggcggttatcacctctgcgggcttaccctcagccacaagtttcccggtatgaagcgcagagggttacattccttgatgaagtagtccattatccgttcttaacggaacagttataggatgagagcaggaggggttctattaaattaggatgaaaataatatccatgtattacattctagatcatggtatatttgtattattaaaataatgtaaggagattctacatgcataatcaattcatcaaaaagttgatcgtactttgtttggtttttgtattattaccagcaacgagcgttttggctgcgtcgtcacttattaaggacccggtcttggccaaagttattcgagcagatctgaagatgtcggctaagaaggaaataaaggctgccgatttgaaaaaattaaaatctctatatgctatggaattaaaaagtaagatttctaacctgcaaggtcttgaacatgccgttaatatgacggatttattcttgcctggtcaaaatataaaaaatattaagccactctacaagttaaagaaattgacgttcttagctgttgaaggcaatcagattgcagatatctcgccacttttaggtctgactaatctgcaaaatctggttatggacgataacaaaatcaaaagcctggctccattaaaaaatatgcataagctgaccagtttactcgccagtgggaatcaggtgaccgatctaagtccgcttcagaaattaaagttggaatgggtcattatgaatgataataaaattcaagatctgacacctttcaagaaccatccaaccttggagtatctatatgtagaagataatctcattgaggatattgcagtgctcgaaaccatcccacatctaacagaagtatatttggctaacaatccgctgaatgatcgagcagaacaggttgtgaaaaagttggagaagaaaggcgtccttgtaagtctggtaagcgaagaagaagaagaagcggatcaggcgaagtagttttgattagagaagatgtatatgtatatgtatagtaagaagaagtaatccctcgtcaatagtgaacaaaaacaaagaaggccgcagatattctgacggccttctttaattatgttggacagaaacgctcggtaacaacttaacgcccgtcccacaacaatattattccactacgatctccttcaccgtctctccctcaaccagcaccggctgatagtaggtgtttgttggcagatcctttttgccttgcagattcttgatcacccagtcggcagcatcacggcccatttgctcttggggatgggttagcgttgtaagcctgatgttggcgttcttggcgatgtacgaattgtcctgcccaatgatggataactcatccgggatcgagatgccgagttgcctgcaggcgttcacgacctccagtcccacctcatcgttgtaacagacgattgcggtgagcgaatccctgttttcgtccagatacgttgctacattagaggataaactcggtttcgatgcggtatcaaaggaaagcacttgctcaggatggaaccgtaacttcgcttcacccagcgccttgatgtaccccttcatccggtatttgccttgtagatcatccattttggcaataatgccgatctgggtatggcctttggcgatcaattcacgtgtggcaagataactggattgcacgtcatccaggcagaagaacggaacctccagctcctcataaaatgcattaatcatcgtaaacggcacatcctgctctttgaacgataggtagtatgcaatgttgggattgtagagattacttttggtcggttcgacaatcaggccatccacgccgtaggagagcatcatttcaagggcttttttctcctgcgctacatcattattagtactggccagcagtaacgagtagttgtcctcatttagacgactctcaataccgcggataatggacggaaagatataatccgagatgtatgtcgtgatcacaccaattgttttcttcgatgtgttgccgcctgatcgagagcgatactgattgctaacgtaagttcctgaacccttttcgcttcgtaaaaacccttcgtttgataactccaaaatagccttccgcaccgtctggcgacttacgttgtagctttcctgtaatgccaactcggtggggatctgttcgcctatgctatatgtccccgaaaggatatgactctttatatcatcaatgatgacctgatattttggcttcacgtagtccacttctttcatcgttactcatctatataaacgttgttgttcaaatagttgtacgtacatattttagcatgattcagataggatgaaaataaaaccgaacatttttcaaaataaaccgtacatatccagcctttttgaatggaggtgtaccttacagcatagcctttttatagccatataagacctttgaatggtcaaaatgagcacaatatatgtcctttgtaagtataactattatatattattgacaaatgtacgtacaaaaaatatactaaggctgtcagaaaaggaaagcgcattctttgaaaacacaacaggaagcatttatacaaaattcattattagctactgccataagtagaagcttcaccttatatatgcatcctttgggatgtgaaatcgcgaccggagaggggatacacgtgattatgagtcaactggacttgaaagaagccattaccaagggcgctacttcgctcggtattgaatttggatcaacgcggattaaggcggtgttgattgacgagcgttttgaaaccatcgcgtcaggcagttatgaatgggagaacctcctgaaagatggatattggacgtacaaccaggaggatatcatcacaggtctgcaaacggcttatcgtgagatgaagcaagatgtagaacagaaatacggaattacgctgcgaacggtcggttctatcggattctcggccatgatgcacggatatatcgctttggatagcgcgggtgaactgttggtccctttccgcacgtggcgtaacgctacgacgggagcagccgcaagagagctaacggaacttctgcaattcaatattccggaacgctggagcattgcccacttgtatcaagcgattttgaacgaagaggtgcatgtgccacagatcgatcacctgacaactttggctggatacatccactggttgctgacgggcaataaggcgattgggatcggcgatgcatcaggcattttcccaattgacgagtctacacataactatcacccatccatgatccgacagttcgatgaacagattgcaggcaaaggttatccgtggaaagttgaggaccttctgcccaaggtatatctcgcgggtgagaatgcaggtgagctaacggaagcgggagccaagttgctcgacccttcgcaagatctgcaagcaggcattccgctctgcccgccagaaggcgatgccggaacgggtatggtggcaacaaatagcgtgagaaaacgtacggggaacatctccgttggcacatccgtatttgcgatgatcgtactggagaaggaattgtccaaagtgtatcccgagatcgatatggtcaccacgccggatggcagtccagtagggatggtgcatgccaacaactgttccagtgatatcaatgcatgggttggactgttccgtgaattctctcaagcaatgggatatgaagtggataacgccaagttgtttagcgtgttgtttaacaaagctttggaggcagaccctgatggtggtggcttgctcagctacggttactactcaggtgagaacattacgggacttgagaaaggccgtccattgttcgtccgctccccggaaagcaacttcaatctggcaaacttcatgcggacacatctgttcagtgccttcggtgcactcaagttgggtatggacattttgacggaggaagagaatgtagccattgacagtattttggctcacggtggcctattcaagacccctgtcgttggacaacggattgtagctgctgcgatgaacgtgccggtgtcggtgatgtctaccgctggtgaaggcggcgcatggggcatggcgcttctggcttcctacatgatcaacaaggatcaagaggagagcctggatgtgttcctagagcagaaagtcttcaacgatgttgagggagtcgaagtggcgccggatgcatcggatgtgaaagggtttgaagcatttatcaaacgctatcggagtggactcacaattgagcaatcagctgtagatcatctggtagagaacgggagggaataacatgttagaacaactgaaagaagaggtattccaggcgaatctggaactgccaaagcacggacttgtgaaattcacatggggtaacgtcagcgcaatcgatcgggaaagcggtctgttcgtgatcaaaccaagtggcgtcagctacgatacgatgaaagcaagcgacatggttgtggttgatctggacggcaacgtagtggagggtgagatgagaccttcctcagacaccgcaacacatgccgtactatataagcattactcggaaattggtggcatcgtgcacacgcactccacgtgggcgaccatctgggcgcaagccggattggacgtacctgtaatgggaacaacacatgcggacacattctatggggcggtgccttgtgcacgtttcctgaaccaggacgaggttgatcgcggatacgaagcggagacaggacgcgtcattattgaaacgtttgaacagcgtgggattgatgttatggctgttccagcagtattgcttcatgggcatgcgccgtttacgtgggggaaagatgccaagtctgcggtggtgaacagtgtcgtgctggaggaagtgtgcaaaatgaacctatacgcgcggcagttaaataacttcgcgaaggaactgccacaaggcattttggataaacactatctccgaaaacacggaaaagacgcgtattacggacagaagtaattagtttgtgtatcgataggatgacactaatccaatcgaataggtcttgtgctactactgccaacgaagttgtataaaacttttacacgataacggagaagacagaagaaagctggagaagcggagcgttcacctttatccccggattttccctttagaaaagggaatcaaaaaaatctggggataacagtgatcggaagattattctggctgcgcagtggtccagtgtaacccatttgttcaactataaaataatgaaatgaggatgattatatgtcagcagcaaaagaattctggtttgtggtcggttcacagcacttgtatggagaagaagcactgggcgaagtaaaagcaaatgcacagaaaatcacggatgcccttaatgccagcggcgtactgccgtacccgctcgtattgcaggatctggcggtaagcgcagataaaatcacgagtacgatgaaggaagtcaactatcgcgatgaagtagcaggtgtgattacgtggatgcatacgttctccccggcgaaaatgtggattcgtggtacaaaattgctgcaaaaacctttgctgcacttggcaactcaatttaacgaaagcattccttgggcaaccattgatatggacttcatgaacctgaaccaagccgctcacggtgaccgcgaatatggcttcattaatgcccgtctgagaaaacaaaataaaatcgttgttggctactgggagcgcccagaagtgcaacagcaagttgcagactggatggacgtagcggtagcttataatgaaagctttaacatcaaagtagctcgcttcggtgataacatgcgcaacgtaggcgtaaccgaaggtgataaagtagaggcacagatccaatttggatggacggttgattacttcggtattggcgacctcgtgcaatacgtgaacgccgtaacagagcaggaaattgatgatctgatcgctcagtacggagacctctacgagttcgattatggtacaaacagcaaggaagcttgggaagccagtgtacgtgtgcaagcgagttatgagattgcgattaaacgtttcctggacgaaggtggttacagtgccttcactacgaacttcgaagatctgcatggcatgaaacagcttccgggtctggcagtacaacgcctgatggctcaagggtacggatttgccggtgagggtgattggaaaacggctgcgctggatcgcctgttgaaaatcatggcccataacgagaatacgggcttcatggaagactacacatacgagatggccgctggacaggaagcgatcctgcaatctcacatgcttgaagtagatccgacacttgccagcaccaaaccaagaatcatcgtgtccccactgggcattggcgatcgcgaagatccggcacgtctcgtattcgacggcaaagcaggtgaaggtgttgtggtatccatggcagacttcggtacacattacaaactgctgatcaatgaagtatctgcatttgagccaaccgttccagcacctaacctgccggtagcacgtgttctgtggagcgtgaagcctaacttccaagatggagtgaaagcatggatcgaaaatggtggtggtcaccatacggttgtatccttgaacctgacgacagatcagatcgtgacgtatgcgaagctggtgaatctggagtacgttattattaagtaaaagtggagtggcagctactgcctgaactcaaccaatttttttctctgtggccgggggttaaccctcggccctttgtttgttatgctgagaagcatgatgtgaagctgagcaaggatttgctttttcatcgaaaagggataagaaatgaaggaggaaggacatgtatacaaaagaaagcttgatgcagcagctagagcagcttggtatggataggcaaggcacgttgctcattcactcttcaatgaaaagtataggcgaggttgaaggtggagcagacacggtgttgaatgcctttagtgactatatgaaagacggattgctggtgcttcccacgcatacgtggtctaccattaatgcggataacccagtgttccacgtggaaaattctacctgttgcgtgggtattctgcctgaactgtttcgtcaacgtccgggcgtagttcgttcatggcacccaacgcactcggtagcagcactgggacgggatgcagaggcgtttacgaaggatgatcatctcttcgacacaccgtgtgcgagaggttcagcatgggggaaactgttagatcggaaagcgacgatcttgttagtaggcgttgacttgaagcggaatacatttatccacggggtcgaagagtgggtggacatccctggcagaatgacggacgagcatgaaatgctgtatacagttttaccagatggaagccagatttcagtaccatcccgcagacattgtgggttgccatggtcagagcatttctggaaagtagacgaggtactggttcgcgaaggagcgatgcgtacaggaaagctcggtgatgcggtcgtaagagtgtgtgatgcggctaagacagcagaggtaattacggagatgctcaagcataaccccgatctattcacggacaatctccctctacatgcagtaaccgaatgatacaagggccgtccgatagccggatggctcaatatcgatcacttgatgatatccgaatatctcccgagcagatgatctcctcccctgtttgtactctaaaccttcaaaggcattcataaataatcagaaatagatcagcatttcgatcagaggttggtcggacttccagtgtatgggctactcacccttttggtggtgtgataagatatggttaaattaaccaataaggttggcgtagcagaattgtataggtgtttattgaagttatatataagtatcacatagaatcatgaacaaccacgttgtcattgtagcatctaagaaggagaagattcgtgaaccctttagtatggtatgatctctttttatttgtcctattgtttggtgtaggtgtatatgtgtttgctacagttagaattacgaacttacataaggtgtactttttatttcacgggttgatgatgctctggcctttctgtcaatttgccagtacgcttacggatgattctggtctgcagttgttctatgttacgttgtctttcgttgcggtctctctgcttgggagcgggtggcttctactgacgatctttattaccggttacgcggagcggttgagtgcaaaaggcactttcctgctatttgtccccgcggtgatcggggctataggtgtagtcgcgaatccatggaacgagttcgtcattcccctggagggcaggtacatcgagcgggcttacggcccttggttctgggttgtcatggttattctggtgagctatttcttggcttccctcgtcgttctgttccgggcggtgtattcatcgcagacgtctgccatgatcaaaaaacaggtgagaatcaccctgtggggcatcttggtcttggctgtctttgcaacaattgatgcgattctgaatgttgttctagcccggtggttgccgatcattcctggcatgacttcgctggggatctttctgtcggacctgttctttgtctatgtgatcaaaagatacaatgtgttcgatctggtctccatcgcgcatgaggacgtgatcaataccattccatatggcatcctggtactggatgagaatgaagtcattgttgaagcgaacaaagcctcacgatcttttatggatctgcatgtgggggattcttttgatatggaagcttttctggagtctgttcatgttgtgggcagctgtcgggagttcgtgaatcactataagaaaaaagaaaataccctctctcacattgaagtgatcgtggagcgggataacaacatccggcactttatcctgcaatcgtctccgattgtggattcggctcttgtgccgatcggtcatatccttacgttccaggatgtctcgcaagagcgcttctatgtgaaagagatgaatcgccagaacgagacgctccaggagcgaaatcaggcgctagatctgatccgtcaggagttatccgaggccaatcgcaaactggaggaactcgcgctcacggacagtttaaccaactgttacaaccgtcgttatctgacccaacatctgaatcacgaggtcattaccaatattcaatacaaaacaccattctctctcctgctgctcgatatcgactacttcaaagcgatcaatgatcgctatgggcatgtcatcggggatgaagtgctcgttcgcacggcggaggccgtcaaacaatccattcgcagtaccgatatcctgacgcgttatggcggggaagagttcatgatctaccttccgcacacggagcatgatctggcgaaccaaatcgcggagcgcgtgagaacagctgtagagtccaacctcattatggtggatcacgagagtacgcaggtgtcgattacgattagtattggaattctggcctttgaggattttgaagttgtgcatgtgccggacaatccagaggggtatttgacgcagctttttgccgcggtggataaggcgctgtatcaggcgaagcagaatgggcggaacagagtggagtttgcggagtttgagcggggagttgtttgaaaagagaaataagagaagagtggagacgtgctccactcttttttggtattaaataatgatgttgataaagatatatttaatcggaatttttatgtgatttttcgatagcatttaaaacttctttgctaattttggtcaatgatacgattgtatctgtacttttgccgcttattaaagttatatgttcatccaaggctcttttgtactcagagtcttctttaaatttaaagatttcttcagcagtgacctgcaatccattcattattttctcaagagtctccaaagaaatgttacgatctccccgttcaactccaccaatatagctgtaatgaagacctgctgcttccgccagttgttcctgagtccagccttttgccttccttaactcacgtattcgatttcctacgtcctctggtaaactcatttgatcacctccacttaaggttagaagaggttatagaatccttacagactaatatgtgcaaactgtatcattgaataaaagtacttataagtacaatttatgttgctcttcttttcatttatctatacaattataagaaaatgaataattaaggagggttatctttgcggaaatctatcctaaaatcactcaaaccggacatcattgttgaaatgttggatatggctgtggcttttgaaaattggaacaaggtgatggagagggcggacatgttatatcaatgtgtgcagtacttctatgaagagcggcaggagtatcagtcaaagggagtgcctgcaccacatatacacatcgagaggcccttggtctactattacgggttcagtcacctaatgaggggtatggctcaccagaagatgggacaggtagatcaggcgcgagcatgtatcgatcaatatgcagaactggggtggatggaggatctggatgaggtaggcatgcaggtggtacaggagttcaggcataaggcacaggtgaatcggtatgctcttgagattgaagccgggcaggtgcaactgctggaggagtttgtgaactttttgcttgagcatccggaggaatgtctggcaggtctgaaggtgattacggaagcagcagtgcgacataggtggcagattgatcgggttttacatgtgtttgaggatcagatacagggtattggcagagaagtggattcttcaaacaacgatgatatgtaccattactgttatcagcgggctttgtatgaacagtggatgggaagaacacaggaggccgtggaattcattttgaaggcaatcaggttagtgcataagctaaggatggatcagtattttataaggtgcacggcattgttggaatcattgcgggaagaggcgacagcggagcagattggacgatatcgggtgatgttggaggaaatgaagtaggaaaggtatttactgaaactggtaggatatgccttgaagtgggtatatgcatataggaccatagcaccgatgaggagcacaacttgtgtttttagcatggtgaaatcaggatgttagccggatagtttacatattacacttctgctaacataggataatcctatttcgaatgagcggagaaacgtatgagtacaatcaaagttacccctgaacaactacatcacgtatcgaatcaggtggatcaggccagacaacagttggagagtataaaaagtgatctgacgagacagatcatgttcgttcagatgatgtggatgggcgcgacgcaggagcgattttactatgagttcgagcagtcacgacctatactggataaagcgctggagagtatggtgaatacatcgaaggaattgaaggatatcgccacgcgtttccaaaatgcagatgctcaaaaggtaagtctgggtggtgcgtttggagcagtcggcgccgtagctatgatgaccaaatcaacaggtgattcaggttcgggtgataagggctatcggatggcgcaagtcaatatgtttggtaaattggtatggatgccggtcaacgagaatggtgttgcggatcaggctgctcttcaggcttatcagagggatcagggaaatctggactttaatcggatgcaagctgtgaacgttgaaccgcctggggaagatatttttgcgttacagatcaaggcgtttgagatgggcattcatcctacgacaggagagcctgtatccgataagtatgctcagatgatggtgacctctctgaagtttagtcagatattcatggcgattcagatggttcgaggaagtatgccaggacgttcaggaccgtttaaaacttcgtcaactggcttggcatctaagattcagaataatataaagaaggctgaatccagagttgagaatactcagaccgataacagcttgggagcgactccaaaaactattatcgattcagaaatggaatctaaaatattggaagggcagcgaaaagtcccaaaaaatattttgataggtggacactcacccaatataaacaatagcaacaatagttatgctgtagaagtagtaagaagtaatccggatggaactaagtatgttctctttactaaacaattcgaagatggaaatatttctaaacttaagcatagtactttgtttccaaattggtggagtgaagataagattattggaagtataaaagatgttggagatacgcccgccatatcatcaagaataagagatagggctacgtggcatcgtgagaaggttgatggtgtagaagttgatgtaattaaaaatggggatgaagttagtagcgcctatcctacaggtgatgtaaacgcaccccaaccagcaggtttctaacttataaaatgaaaggtaactataaaatatgtacaaacaattagataatcttttatcagctgtgaccacagttgattcctggtatgatgacggttgtattatagcagcagaaatattggaggatttcggacaaagtgattgggatcagttaaccattgaggtgttgaataaaccactgtactggaagaaaaagctggcttactgtctagatagtacacagcacacacaagaatttgaaatcctgctttctctactttctgttgaagacagcgagttgtttgaaatatgtatagatacattaagaagttacacatctactgaacataagcaacgaattataaatcatccaatgatattagatcgtgtgcataatgcaatttcaggagcaggcactgccagccaaaaaatattagaggaatttcttaaggggttaaaatagatgaaatgagtataataagcgagtacctaagtttatttgagagtttaggagttgtgaaaagtaatgtacgaatatcatggctgggcaaccattagagagagtgcatcgtttgaagaagatgaatataaatatggtttagttattcaacatctgcgggaatatgtaaaggagctaaactggcctacaggtgttttggacttgagagcagttaatggtgactttcaactatggatagcgggcctagataatcacaaacctgtatcaaagtatgatcccaccgaagtgctgaaaaaggtaggtgaaatagctccgggctcctatggaattctttatgtaagagatagtgatgatccggaatccttcaatcagtttaaggtctatgctttaattcgaggtaaagttatggagaatgatgatccgtttctctccccattcatacctaaactagaagatgattacgaaggataatttcatatctaacttttcagcatgtagtcattttgaaataaaggctactagaacaatcatatcttattctatggcatcataaagttccgacattcggtcagccaattccaactgtggttgcattcgctgatgattcatatcggtaggtgtcatgtacagcacttcttctccctgctcaaacattgttacatggaacaatacccctgtagcatcttcttgatctggatcaattacaatttctaaatcgcgtaccttttcaatccattcctgaatcagcacttgatctgtagttgtttttttagtaccatcaccaccagtcatcatttcaatagagtcaacctgtgtaatatcgccaggataaaaggtgtgtaattccttctggactttatttacttcgacttgatcgggctgattagaactttggcagccgctaagaatcaggaccataactgtagcaaacattaaggcgataagtgaatatcttctcatcgtactccccctctttaaacgctaaacgaattttgtatttgaaatgttccgcataaactcaattttgtttaatccttaaagtacatcgaggttactggtcacatttgctggaagactacgaaactgggtttaactcttcgagaaatcttgcatggttctacatctaaacaatcccggatcgtaaaggaaatgcccgctaataaagccctcatatgtaacaaaaaacatgaagaatccgctctcatccgagagtcggattttttctcgttctaacaccaacataactcttgtcaaaacgtaatcattacgatatgataatactcattgtttagatcataatgattacgattaagagagaggggcattaccttgaataaaaagacgccactgctagcgctggtctccttggccttgagcgctggactgttgagcgcctgcggatcatctgagtccagtcccgctgcgcaaccatccaccgataataaaaatgttcacttcctatataacttctcgaccagttcgctagatccacatgtggattccagctatgtgccgctgcgcgcgggcattacggaaacgctggttcgtctcgatgaagagaacttgacggttgctccatggctcgccgagagctgggagagcgaagacgggcagcattggacaatcgacctacgagatgatgtgacattccagaacggcaagccaatgacgggtgaatccgttaaggcatcccttgagcgggcactggatgagaatgtagccatccagaacgcgctgaagattgatacaatcgaagccgatggcgacaagctggagatcacaacaactcagccgttcccggaattcgcttcggaactggtgaaccccaacacggcgattatcgacgtgagtgagccggacattgtgaacaagcccattggtacgggcccgtttaaactgacctcttttaccccaggcagcaagctgcaactggatcgctatgatgaatattgggatggagcatcgcctctggattccatcacgttctcattcaatgaagatgccaatgcccgtacactagcgctcaaatctgggcaggtagatatcgtataccgtccggaggtagagagtcttgaatcgctcaaagcgatggacggcatgaccgttgaatctacatcgacattccgcgtgcatcagctaacgatgaacatgcagcgggagagtatgaaggacctgaatgttcgtcgtgcgctggacgcgctgattgaccgtcagggcatcgtggatacgatcctgctcggctatggcgaagcagccatcggaccgttcctgccatcgctgccatttgcaccaacctatacggatacagcaacggaatccggagctgatgtcgctgtgaaatatctcaacgaagcagggtacacgcagcaaaacggcgtgatgaccaaggacggcaaaccattgcagctgacgctgctgacatattcagcccgtgctgatctgccactaattgctcaagtgttccaatctgatgcgaagaagatcggtatcgacgtacagattcgtcagattgacacgccagaagattatatggcgtctaatcgcgactgggatattgcaacgtacagtaatttgacggcccctcgtggagatgctggttattacctgaatgcaacataccatccgaagggtgcccttaatttcagcggatcggaagatccagagctgaccaagatcatcgacgaactgaatctcacagttgcaccggagaagcgcgcagagcttgccgagaaggcagccaactatgtgcatgataacgtactgaattcattcgtgctgcatccaggtacgatcgttgcctacaacggcaagaagatcaagaactgggttaccactcgcagtgaatattacatgattaccaataagctggatgtgatgtaatgtttcgcattttgcttcggaagttccttgaggtatttatctttctgttgttcattatgtttgtgagtttcctgttcattcgtctggctccgggtgatcccgtgctgacgctcctgaatgtggacgaactgtccgttagtcaggagcaggtcgaagctgtacgcgaggaaatgggcttcaacgattcgcttcctgtccagtttggtaactggttgctcgattttgttcggctcgacttcggtgtatcgtattcgacaggccagcccgtcatgcagaccttgatgcgtgcgctgcctgctacggctgaactgacgataggcgctctactggtcatgctcgttatagctatcccgctcggctcgctatcagcgctccatcgtggcagttggattgaccggggcagccggatgctctccattgtgggtgcggcggtgccaagcttctggctgggtctgatcctaatcgacatgttcggcgtacgcttcggcaatctgccgaccatgggccgggatggattcacctcacttattctgccatctctgacgctgggacttgccatctccagcgtctatgtgcgtcttttgcgttccagcttgctagattcactaagtcaggagttcgttcggtccgcccgggcaagagggttatccgaaggccggatcttcatgcttcatgcgtttcggcacagtctgccgcctgtcattacagtattcggcgtcagcctcggcagcctgattggcggagttgtcgtgattgaagtgttgttcgcttatccgggcatcggcaagctcgtcgtggacgccatccgccagcgtgattatccacttattcagggttacatcctgatcatggctatcgtggtattcctcgtgaatacagcggttgatctatcttatcgttatttgaatcccgaaatgaaactcaaggaaaaggaggcccaccgatgaaaaccatacccctgcccattccaacgacaaaatctaaaaaacatagctggcaggcgatcattggtctgctgtttgcactgctggtcatcgcggcctccttatatgcctttttatacttgaagcatgatcataccttaacggatctgcgcggacgattgcagggcgcaagcgctctccatccgttcggtaccgaccatttgggccgcgatgtactgacacgtctgctgcttggcggcggtcaaacattgggttatagcctgttggcactcggtgctgcattgctgattggtatcccgtttggcttgattgcgggttacaaacgtggctgggtcgataagctgttcatgcgcatcgctgatgcttttctcgctttccctgataccatcgtggcgattgtgctcagtggcctgcttggcgcgggaatcggcaatctggtattggcaattgtgatcgtgaaatgggtcagttatgcgcgtctcgttcgaagtacggttttatcggagtcccaaaaggattacatccgcatcgcccggaccaacggattgtctgacggtcgaatcatgagaaaacatctgcttccacatatcgcaggtcatgtgctcgtattagccagtcttgatctgggcaaaattatcctgctcatctcttccttgtcctacatcggccttggcgcacagccgccaacacctgaatggggtgcgatgctgaatgactcacggccttatttccagtctcggccagagctgatgatctatccgggtcttgccattgtctcggtagtgctgcttgccaacatgctgggcgactatctaagagaccggtttgacgtgaagaaggaggtgcaaccatgattctctccattgaggaactgagcatctctagtcgggatcgtacgattgtagatcaagtctctctggctgttcgcgaaggcgagttcatggcattggttggacagagtggtagtggcaaaagcttgctctcgcaagcaattggtcgtctgctgccgcccaacctgcatgcgtcggggcgagtcatgttcgagggcagcaacctgctcgaacggaagccaaaggagatgcgcgccctgcggggaagccgcatctcgtatatttttcaagactatcagggagcatttacgcccttccgcagcattggtgggcactttgatgaataccagaaggtacatggagaaaagtcttctgctatccgcaagaaacgagcggaggaagcactggaatcggttggccttggcgctgatttgctacgccgctatccgttccagttgagcggtggacagcttcagcgggcatcaatcgccacatcgctgatgctgtctcctcgcctgttgattgctgacgaagcaacaacagcgcttgatagtgtatccgggcatcgcgtgttggaactgctggcacgcaaacaagcggagacgggatgtgccattctgtttatcacacatgattggcgccatgtacgtcgctatgccaaccgcttggctgtgatgaaggaggggcagatcgtcgaatctggcgggaaacatcgcattcttgaccatccccagcatgaatatacgcgccagctgattgatgcggctcccgttctgagtcgttcgctgaagtcgggattgaaggaggcaggaacggaatgaagacaaccgcaaatgatgaacatcgtggactggtgcagtccaaagaagaatctggtgtgcgaagccacgattttgctaaagacttaaaccatgcagacacagacaatacagtcataaatactacagaaacggatcatgcagttacagatgcggatatagatactgccggttcagacaatgcttcatcgctcagcatccctggcaatcctgtgcttcacgtggaacatctcagccgaacgtatgcgggtgcagaccgaccggctgtgaacgatatttccttcaccctgaaccacggcgaatgtcttggcctggttggcgagagcgggtgcggcaagagtacgctcgcccgctgtctgctacggattgaggatgcagatacaggctcgattacactgggtggacaggatattgcacggctgagcggccgacggttgcgacctcatcgccggaagattcagattgttttccagaatccaatggctgcactaaacccgaagctcaagattgctgattcgctgattgatccgtacgaacaacttggacggaacgccgagctgtcccactttacctatacgtcgaaggaggcttacgtccaaaagttgcttgaagcggtggagcttcctagcgatttggctggacgttacccccatgagctcagtggtggacagcgtcagcgcgtcacgattgcacgtgctattggcattgaaccggacgttgtcgttctggatgaaccgacggccagcctggacgtgatctcgcaaggagcagttttgcaattgctcaccgatttacggacatcccttggtctttcatacgtgttcatctcgcatgatttggccgcggtacatcccatgagtcagcgtatcatcgttatgcgggaaggtcagatcgttgaccgctttggcgcagaagcgttgttcgatgaagaacgccatccgtacacgaaagagttaatttcgatcttctgagtactcccggagacgccgggggtggtaatcgttaatttatatatgaagccgccttacgaagagattcgagagcggcttttagtgcatccatttcatcaccaaagttcccctaaaaccgggttcctttctttgttttgaacaaatatatctttcaggcctataaccgggctaacgttccgatgtaaactagcgtatactgatggaatagcaaatatcttgaaattgcatatttaaattgctctatattattgatacactagatcaaggttataatcattcagagaaggtgcgatcccgttcaagaatgggcttgctgcaaatgccaaatcgataacgcttacatccttttggcaaatataggatataaggacggtagacatgagccagggacaaacgagtacagatgttatcttgattggtgccggaattatgagtgcaactttgggaactttgctaaaagaattggcaccagactggaatattaaggttttcgaaaagctagccactgcaggagaggaaagctccaacgaatggaataatgccggaaccgggcatgctgcattgtgcgaacttaactataccgttgaacgaccagacggaaccgtagatattagcaaagcgattaaagtgaatgaacaatttcagatctcaaagcaattttggtcctatctcgtcaatagccgtctgattcgtaatccgcgggacttcattatgccgattcctcatttgagttatgtacacggagagagcaatgtccagtttttgaaaagacgttatgactccttgtcgaatcacccgttgttcgcaggcatggaattctcggatgacaagaaagagctggcgaaatggatgccgctgatgatgaaagatcgtaccagtaatgaatctgttgcagcgaccaaaattgactccggtacggacgttaactttggtgctttaacgcgtatgctgatcaaacatttgaaggaacaacaagtgggcgtccactaccaacatagcgtgaagaatatgaaacgcaccagcgatggacaatgggaattatccgtgaaaaacctgaagagtggtgcagtcgaacgccataaggcgaaatttgtcttcatcggcgcgggcggcggaagtctgcatttgctccagaagacgggcattccggaaggtaaacatatcggcggattcccggtcagtgggatctttatggtgtgcaaaaatcaaaaagtcgtggaacagcatcacgccaaagtatatggcaaagcttcggtaggggctccgccgatgtccgttcctcatctggatacccgttttatcgacaataagaagtcgctgttatttgggccgtttgccggtttctcaccgaagttcctgaagacgggttccaatgccgacttaatcacgtctgttaagatgcataatctgcttacgatgctcgcagcaggtgtcaaagaaatctctttgaccaagtacctgatccaacaactgatgttatccaaagaacaacgtatggcagaattacgtgactttgttccgggtgcgaagagcgaggattgggatatggttctggcggggcagcgtgtgcaggtgatcaaggataccgtccagggtggcaagggtacgctccaatttggtacggaagtggtcacgtctgcagatggaacgattgcggctctgctaggtgcatcaccgggtgcatccacggcagttcaggtcatgcttgagattcttcagcggtgtttcccgcagcatatggaggcatgggagccaaagatcaaggaaatgattccttcctacggtatatcccttgtggagaatctggatctcctcaaagaggttcattcttcaacagccaaggcgctggggttatcggatgaaaaacatgtcatgcacgtataacgtttagtttatcgtgttagatcataatgaagtcatagaaaagagagctaagccgggtcgaaacctgtgcttagctctcttttggtttatttggtatatcagaaccggaacttgaactcgagcctgggcttggaattgaacttgaacatgtccgctatcatcgctttccccgtagatcttacacaaagcaaacggatatggatcgtatagtatgcctttgtagagttatagtacgatcttaatgctcaggctctcaactgcggtccaaagggatgacaaaggaaactttcgtaccttggcccggcgagctgacgatggtcaaaccttgtccgtacatctgggtcaaccggcgatgtgtattagttaatccaatgcctccggttccgccgggtcctttcttgggccacgcgagtgcccgttcgatctgctcgggctgcatccccacaccgtcatcctcgatctcaatcaaagtggacgctgtttggttgatgattcggatatgcacggttccaccctcaactttgctgagaataccatgtcgaacagcattctcaatgagcggttgaatggtgagtggcggcagggatagatcaagatcatcgggaatatcccagatgacgttcaaccgattcatgaatcgttctttctcaatgtagagataggcgcgggaaagatccaactcatgagtgacctcaaccattttctccgaattaacaaaatgaaaactggtctgaaggtactcgataaaagcatcgcccagtttctgcattcgctccgtgtccatctcactaagaaccatgattgaattgagcgtattaaaaagaaaatggggctgaatctgtgcttgtaagtaagcagcctccatgcgcagtcgctcatcaatggattgtttcagtacgatcagagacccgatgcgatgccttaattcaacggcatccacgggcttggtgacatagtccgtagcaccggccatgaatccggcatatacatccgctggttcgttacgggccgtcagcaacaggatgggaagctcggataccgaataacgtttgcgtacattctcggtcagttcataaccggacatatgaggcatcatgacatcggcaatcagtaagtcccaaggctccttatccaataattcaagtgcctcaagcgccgaggccgcgggttgaatatgatacggttcattcgcaagcatggagatcagtactcgcaggtttacaggatcatcatcgacggcaagaattcttgcggcagtcttatcttgagagacggtctgctgctgcggctctgcaatcgcaatttcatcgaagctgtgagcgtcccattgctgctcagtctggtccgatagcgatgcggtgtcttcccgtggaagtgagatctggaaggtcgatccttgcccaggtacggattgcacggtgagttggccgccatggagttcggtgagctgcctgctgatattgagaccgaggccgattcctccgcttaaacgagcctctggggtcccttgttcatacgcctcgaatattcgctgttgtatctcctcactcataccaacacctgtatctgaaacttgaatcaagacgtaatctccatgttcccgaacggacacggtaatggtaccctcatcggtaaatttgagcgcattatgcaacaggttgtagagcacctgaacaagtcttctctcatcggcttgaatcaacggcagtgattctggaatatccacctgcatatggatgggcttgccctctgccatgaatcggaacataccgatcacgcctggaatgacagatgcaagagataaaggtttcttctgaagcgtaacacgtttttccttcaaacgaatgacatcaaggaggtcatccaccagttgggacatgcgtcggccgatggtaactaacagcttcatgtcttctgcctgctgcccacctgatttacgacgttcacgaaccgcgatgctctcggcgatattgatgatcccgtgcagcggtgtacgcaattcatgagccgtattcacaagaaactgatccttctggcgatcctcttctttgagctgttcgtacaacttctcgatctcacttgaattgcggaagtattttctgaaccaataggcggagaagccaaacatggccgcaatcacatcgatcggataatacacgttggtaatttcgctatgtgagttcacaattccccataacacgcttgataggctactagtagccgcaaagagcaaaaagcttgcgtcccttcgtttctcggctgccattcggaagaataggtacacagaccagccgatggcaaacagataaaggaaatcagagagcccaatctcaagtacatgatagatcagggtcactggtgcgacgagcaaaaataaacagtaaacgccaagcacgctggcatagatgcggaacagtttacgccattgtagactatgggagaaacttttagccatttgtaaaagaaagaatgcgaacaacggataggacaacgctttggccttaacgatccaagtgaagttgagtggaatccaacttaataacagattgtcatggtcggaagcgaccgttagggcagctaccagtgttagcatcgagaacgtcagcagagctcgttccttccggataaacagaaacatgacaaaagcgtataggctgtgcaaaagcagtatagcgaatgtaatcttttgcaagtcaatggatagtcctcgttcacttccaatggcttctggagaaccaaaatagagagagcgtgtgatccctccgctataaggatcgtcaaaattggctgtctgcaccaaaagattgagttcggtagaaccgtcaagcacataggaagttgtaaatgcagtcctttctggtcgataggcttcggcatgagtggcaggttggccgaattcggcaacaatggtcccgttcatctcgataatcgatgatgtctggattttctgagcccagagagagacttcctccacagatggatctaaaagtatgcgaagatggtatgtcccatatccaaacgacgatgaggattgtggtaatgcatcacgccagtcaccgggaacttgaatcggtgtggatgggttatccgctattttcgcgtcacgattagagattaacgtctggggataaaactcccattctccatccagggatatgggtgaagtgttggcgaggtcccagcctcgaaggtctaacaagccttcaatgggttcaggatgtgcgggtattgtgaaagtctcggaccatatccagcgaaagccaagcaaaatagtcaggaatagaatcgacagcactacatatcggggtatctttttataggttattggtttcatggcagactttagttttcgacagtttacttcaaattcctgcatgccctctgccaaagatgaacatttttttgaataccggaacatagattctatatttaaatgatagcggtcccacgttaggatttatggtaaaattatagattaaagggtgatcagtgagccagaggagttgtgcatatgagagtgattttggtagatgatgaatatctcgctctgagcaggttgaacaaactgttgcaagagagagaggattgcgaagttatcggctcttttctgacggcacaggaagccatagatcagatcgaaattcatctgccggaaatcgtcttcatggacgttcaaatgccggggatgaacgggatcgaggcgaccgaacgtatccatgaggtttctcctggaacagaagttattttcacaaccgcatataacgaacatgcactgacagcctatgggcttgaagtgctggactatattatgaagcctgtaacgcgtgaccgtttggaaaaaacgatgaagatgtatcaacgccgaacggtgtcagcaagtctgaatataacagaagggccatccatgatgatccgttgtctggggatgcttcaagtccaagtgcaccccaatgagccgccaaaacatatgaagttcagaacaaccaagattagagagttattcgcctatttgctccaccatcggaacaaaccaattaagcgggatacgctacttgaactgttgtggccagagttggatgagcggagaggtatatccaatctgcacagtgggatccatcgcttacgcagcatgatgaacgaattcatgggtgaggacaagatggtcattcgttatcaacagtttggttatctgttggaaacgggtgaattcaggattgatgcggaagaatgggagagtcgtcttacccgattgcctctattatcttcgtctacaataactgaacatcggcagacctcagatcaatatgaaggcaaatattatggtgaggacgattacgtatgggctgaactggagcgtcagcgcttgcatgcactatggcgtaatcatgccatgcaacttgcacaatattacatcgaactgggacagaatacggaagcactcacgttatattaccgggtacagcaattcgaaccatcattggaggaagtcggactggccttaatgaagacctacgatcgattaggcaataaagatcctgtggtcgctcaatataatcagttggttatcgctttagaacaagaggcaggtatacgccctggcctagaagttgagttatggtaccaacaatggaaaaattcgaatagttaattggaaatatacagccttgcagcttcatttgcaaggctgttttttgttgtatttgctagtgaaaggtttggtaagagtttggtaagaggccatgtgtagaataagcaagatgagggtagatatgatgttttgagtcagtaagcagtccaaaaataacatattaagtaggaggaaactatgtacacagcaaaaatccggaagaaaccatggcaaagaatttccatgctggttctttcctttattctagcgattggaacgttgcccatgagtttggctcaagcggaggcaactaaccagactcctgttggtccgggcggagttggatccccttcactatggctacgaccagagcgggtaagcggagttgccagcggcgaaaaggtgagtatctgggaagatcaaggcagtaaaataaacaacgcaacccaaagtacggaagctaatcaaccgacctattgggatgataaaaatcataatatcaatttcaatccggtattggaatataacggcacgagtagttttatgaatctggatgtaagtaagcttcctcaagggaagagtcccagatcgatcattaccgttagtaaaaccaataaaactgatggcatcaattatgttatttcatggggagtacaaacgggtggttatacgggtatggggatgcttcaagttgacgcaaggggcggcttgacaacatttaacagtgacagtaatcagactttatacactcccaacaagtttatggaaatgacattcccgaccgagctatttgttacttggacaggtggagacactggaacgaatatagctagattgtacagtaaaatgaagcaggtacaggaactgggtggttggggaaaagaacttaataaggcgtggaatactggtaactcggacggagccgtagttggtaagctaattccggcaactgcgtccaatagtggatattggcagggtacgattgaagaaatcatcgtatttgaccatgctcttacggacgcagaacgccaaaaagtcagcacatatctggcgatcaaatacggctatacgcttgatcagacgaaagccaattcatatgtcgattcaaacatggctacgatctgggatgcccaggagaacgcagtctttacccatcgcattacaagcatcggtcgagatgatcagagcggattgatgcagaaacaagccaaagcgcaggaacagggatctgcgttgacgattgcattgggcaacagtgttgaggataccaattctgcaaataaaaatgaattctcaaaggattcttctttctttacgtttggtgacaatggagcaagtactgaattcaaaacaccgattacgaaagatgagaaaaaaatgcttgggatggagcgtatctacaaggtacagaaagcaaactggactgaatcacagattacacttcaggtagacgaaacgggagctaacccggcgttgcctcaatatgttgtgatcagcgatgatgctaaatttggtaatccaaactcattacatttaattgagaatggccaattaaccctgaatacctctagttttggtccgaactcgtactttaccattgcaactgctgctactcctttgacggtacccgacgtcacactgaccgacgatgagttgacatgggaagcagttgcacatgcagataaatatgaagtaacaatcgaactggaagacggcacgaagcggacggtggaagtaaccggaatggcgcttaacctgtcgcaattggtaccatcgctagaagtaggcacctacaaagtgacagtaacagcgaagacgaacaatccagcctattcagattcagaagagtcgaattcgaaaagttatgatgttattgataaggcgaagttgaaagccaaaatcgatgagattaacggtaatatcgaaacaggcgaactggacgaagaggagtacacaccagcgagctggacagcactggataatgcgatgaatgaagcagagcgagtgttgaatgatccgacagcgacccaagcgcaggtaaacaaggttcttttggatctgactgatgcaagaacgggcctaatccctacaacatctgtacccgttgtagataaatcagttttgcaagcgaaagtaactgaaattacaggtgaaagcctggaagagtcagcgtacacaccagcgagctgggaagcactcaaagatgcgatgaatgaagcaaatcgagtgcttaatgatctgacagcgaatcaagcgcaggtagacaaggcacttcaggatctgactgatgcaagaacgggcttaatccctacaacatctgtacctgttgtagataaatcagctttgcaagcgaaagtaactgaaattacaggtgaaagcctcgaagagtcagcgtacacaccagcgagctgggaagcactcaaagttgcgatgaatgaagcagagcgagtgttaaatgaaccgacagcgactcaagcgctggtagataaggcacttcaggatctgactaacgctagaacgggacttaccaaagtaattggtacagatgaatctacgttgcagacgctggtcccttccgtgggaagcttgtccccggcctttgatccggctaaagacacgtacaccatctctgttccgaatagcgtatatcaatttcagttaacgccaacggcacttgatccacttgcgaagattgaaatagctgttggagatggagaatggaacgaggtttcaagtggcagtgtaagtgagaatctaccgcttcaagtcggtgggaataagatcgttgttagagtaaccgattcacttggaaatgttacggcgtataaaatcaacgtgactagagcatccagtgacaatggtaacaatggtggaggcaacaatggcggcggtggaaatacgggaggtaacggcggaagtacaccagcaccagcacctacacctgcgccagtaccaacgccaactccggcacccgtgaaggataatttggaaacaacacgggatggtagccatcaaccatttgctacatccaaaccatctaataacaaagaaacattggttcaagttgatccagccaagctgaatgttgccatgtcacaaggcacaggccagcagttcgccattcattcaccgaatgatggggatatgaaggtggacggtttaaccctcgaaacactgaaacaattggtggatcaaggttccaaactgaacattagcaatccgctggcaatctatccggtacctggcggtaaaatggacgtgaatggtgtgtccagacagcttggtaatgcagcgttgaatgatattgatgtccatgttgatatcgcacgttcctcggatgctttgattgacagcgctgagacaagagccgcatcccaaggatacgagctacttgtcacaccggttgatctggatctgacgtttacgaaagatggacagaccgtgcgatccggccagctgaacggttatgcaccgaagtatattgcacttccggaaggtatcgatccgaaccggattactacaggcgtaatcattaatccggacggtagcatcttccatgtaccaacggttgtcactaagatcagtagtcgttactacgcactcattaatgacttgcgtagcagcggaagttactcggttatctggaacccgcaggattttgaagatgccagatcccattggggtaaaattgatgtgaacaacattgctgcaagactggatttgcagggtaacggagataacacattctcaccgaaccgtcaggttactcgttctgagtttgccgagattgttgtgcttggactgggcttaatgcgtcaggatgcaccacagaatctattcactgacgttaacgattccgcatggttccgctctgcggtagcccttgcaaatgaattcggtatcgttcgcggttacgataatgggaacttcaacggtaatcaggagatcacacgtgagcaaggatttgctatggttgctcgtgcctaccgtctgattgagccggaagcggcaattagcccggatcagatgaactctgaactggaacgttacagtgatgcagcggatgtatcgaattgggccaaagaagatgtagcccagttgattgcagcggggatcatccaaggtaatgggccggaggtgctgagtccaaagaccacgatgactcgtgccgaggtcactgcattgattgcaagaatgttgaaagtaacaaacttgattgatcaataaacacaatttaaaatgaaaagcctttgctgacattgggggtcggcaaaggcttttttttatttttattaaattcttaaattcatgtcgtaatactttcgccctgttggcagatcgtggaatctgagatgatgggttcaccagaggttcgggcgacaaactttgaactgctggccttcaggctattgcgatccttccttctacaatcattggagatcatagggtcgcagctctcctgaagattttatttcagagaggaggcgtccaggctatcacattccttccttctaaccctaacctttcacgttatatagggatgtggctttcctggactcttttatcatgaacaataccatctatttgcgcagagcaaacaaactcattattgaatcaaacgaagggaaacaacagttgcctaagacacatctggcgactgccctcaaaaatattgaagcactcggatacaccttctcggatgagctaatgcaggcgatgcggcagctgtccaaggaacaatttgaaacagtgtatcatcaacttgtggctgatctaagagtcatggtcggcgcacatgtgaagtacacaccgatgtatgcaggattcccaatgcaggtgatgcaagcggatgaagcggagttatatctcaatgcgattattcattatctgactaacctgactgtggtctatcccgatcaacaatctgtggagagaatgcctttgctggagaaggcggacttgaaagtcattggtttgggcaacaaacaagcattccagacgcttatccgccagatcattgaagccaagggttccatctcggaaacagacaaggcagatatcgatacggtattggagtatgcagacccggaagacgtggatgcgctattacccggtgagattccgttcaaagaaaatgtgggctttgtggttgcctcgctattgaagcatgaaaaagcgaacatcgaccggatcggtccgtatttcaaaacggcaagtgatgtcctgcgtctggctgttgcctggtccaatggtgatgtcagcctggctgcggcttctcccttccgaaaattcaaacgccgcgagagacgccttttgctcggattattggagcaatgtggctccatcacggaggatatgctccgctataaggatcgctggattcgccttggcgaaattctgcatccttcggaatataagcttcggtatccgcgatgcgaagaagcctttgatattttgcgtaataataaaccttattcgaccttcaacggaagtgtggagcttgccttccaatatcggaatgtatggagtctgatcgatctgttgtcacagcgtccaggtgaattcgcgagaagactggatcacttgctgcggatgaccgaagatgaagcgtatgtactgctggcatttggtgaggtactggagcaagtatctaccccggtgttattgcaggtaagacagcattatgcccaccgtaatgaaccgcaggatttgcgtgtctttttcccgaaaggcaatgtagccaaagcttttgctgttccgaatgagctgccagagatcgatgaagccacgtgtcagaatgtcgtgcaattgtgcgaacaggcattggtagagcgcttcgctgcccttgccccgcttggaaagacttatgtcgatccgcagcttcatgattatctggtacccttttcccagagatcggcgagcaaggctctgcgtaccatcgttcgtggaagccgtgtgccgatggcagagggtgataccattcgtttcttcaactggtggaaagagggggacgtggatggaaagtctacagggcgcgtggacattgacttgtctgcggtgatgtacgataaggactggaactatgtggagcatatttcttatacgaatctgcgatcctctaactataaggctgtccatagcggagatatcgtgactgcacctaatggagcaagtgagtttattgatctgcatattccatccatcgtggcttatggtggacgatatgtggtggcaacactgctttcgttcaccagtcatccgtattgtgatctgccggaatgttttgtagggtggatgatgcggaagaagccggggtctggcgagattttcgaaccgtctaccgtagcgaacaaaatcgatattaccgcggatacgcagattgcgatccccgtcattatggatctggttgaacgcaccgtcatctggacagacctggcgctgaccagatatccggactactacaataatgtggaaggcaatcaaaaaggtattgtcctgatgggcaaagcactaaccaatttacgcaaacccgatctgcatgacttgttcatgctccatgccaaagctagaggagaactggtggatacaatagatcaggcggatacaatctattcggtgaatcaaggcgttacgccgtatgatatcgagcagattatggcggagtatctggtttgaattgtttgacttgactactggtgatatgtgaatatcaaggttagaaaagagtagctgatgctgctcttttttctgtttagatgcaaagagcctacagaatggtgcaggtaatgtcggatgcaaagagaatgactttgctaagcttaaattaacgtgggagggatgatatggatacgctgaggcggttaaatgaagccttgaattatattgaggagcatctgatggatgtcgtggacatgaaggagatttcccgaattgcctgctgctcggagtatcactttacacgcatgttctcttttcttagtggtgtaacactctcggaatatattcggcgtcgccgcatgacacttgcggccatggagctaagccacagtgacagcaaaatcattgatattgcgctgaaatacgggtatacatcgccggattctttcactagggcatttcaaagcatgcatggcactacgccctccgaagcgcgaaaccatggcccatcccttaaagcctttccacggatgacatttcaactgaccattcaaggaggaagcgaaatgaactaccgcattgaagataaagaggcgtttcgaatcgtgggtattcgtaaaagggtgccgattgtattcaacggggttaatccggagatcgctgcaatgtaccagagtcttacaccggaattgattgattcgatcaagggggcatcgaacgtccaacctctgggcttaatcagtgcttcagcccatttcagtgagggacgtatggcggaacagggagaactggatcattacattggtgcagctacgacaaaagagacgcctgaaggattggaacagctggaggttcctgcttcgacgtgggcagtatttaccgtcgtgggcccgtttccaggcacgcttcaggaggtgtggggccggatctacgcggagtggtttccttcatcggactatgagctgagtgagggtccggaaatgttatggaatgagcacaaggatgttactgtagagcaatatagaagtgagatatggatacctattcggaagagatgatactgtctctagcttggtatctgcgggcgcagctttttgaagctgcgttttttgttttcagaatttgctatcggatattcgagccgttttcattgcaaatttatgtaatataatggtattattttattggaattgtaagaatacttgtatgtagaagagtgatttaagaagggggtggcgagatcaggtttacatgaagtgatgactctattctatacgcacgcagacataacatttcagtgattatggacaggctcacatagcagacatatcgatatgagacggaagtgtcagttattatacattattatgtaagcgctttattaaatgagttccaaggagggaattactcatgaccaaaagtatagtgagaaaggcgcttggtttgtttttaatcatcgttatgatcgcaacagctgttgtataccctgcatctaccggacacgcggcaaccattaatgttacggataacggctccagaattgaagtaaacaccggatcaggattagtctatgtggtgaacaaaaccaatggggatattatatcggccaaaatgaacggtacggagctgaacagcaacagaggatcgcatatcggctcaggtttgggttcctccgccaatgtgacgtggaatacctctccttcaggatcaaccgtgttaatcacggtatccacaagcacactgactcactattatgcttcacgtggtggggagaatatcatatacatggccacgcatatcacggctcaaccttcgatcggggagctgcgatacattttccgtggtaatggtagtgtgttgacaggtgttccggcgaattcaaacaacaggggtaacaccggagcgattgaaagtcaggatgtgttcgggtttgcaaatggacagtcggcctccaaatattatggtaatgatcaggccaaagatttatccgttcgtggagttacggggaatggcgtcggtgtatttatggcctacggcaatcgggaaaaaagctctggtggtccattcttccgcgacatccagttccaaagtggaacagagacggaagtatataactatatgaactcgggacatgcacagacggagaattggcgcctgggtctacatgggccgtacgctttgatctttacaacgggaggtacgccaagtgtacccgatttcagctggatgtctggtctgaatctgcagggttgggtatccagtcgggggaacgtagtgcttaatggcctctccgggatggatacaggatatgcttacacaattgggttcgctaatagcaatgcccagtattgggtggggacgtcttcaagtggggcggccgccaaatacagcatgatcccgggcacgtacactatgacagcttataagggagaactggccgtatatacggaaacggttaatgtcacggcagggcaaacgacgacactgaatacacgtacgatcaacaatgacccgagtaaagcctctaacatctggcgaattggtaattgggatggtacaccacgggagctcctgaatggacagacgattccgatccgtcacccttccgatagtcgcaacccaagctggggacctgtcacctatgctaccggtagtgcgaccaatcgattcccggcaatccagttccgtggtcagaattctccaaccacaataacgtttaatttgaatgcatctcaagcggcatcttctcatacgctcaacatcggtattaccgcagcttacaataatggtagaccgagtgtaacggttaatggacatgctttaacaaatcctgctgcctcttcacagcccaattctcgtagcttcaccattggtacgtatcgtgggaacaacacaacctttagctggaatgttccagcatcctacttcgtgaatggttccaataccatcacgattacgccaatcagcggttcaagtgacttgggtaactggttaagtgcaggttgggtctacgattgtgttgagttgctgaattgaatgaagaattcaatatagtggaaggaatagaggaggtagcctgcctggttttcttaaccgggttcaggttacctcttttagctttgtcatccgaaatgaaaagatatcgattcatgatatccctaaggatcttgctttgctggagatggtgatccggatagtggtataattttcaatacgtaatcatgagtgaatgaacggggaggaaaagagaatgagagacgatctgttggttcaattgcaagagtggcatgaagaagatgaatttcaggaaattgtagatgcaattcaggcaattcctgtggaagaaagagattatgagctggttaaccatttggggcgagcgctgaataacttggaacagtatgaagaagcggttgaacaattcctgacggttgctaaagagggcacaggtgacccactctggcattatcggattggactggcttattattatctggagcaatatgcgcatgcgctgcaggcgtttgaaagagcggatgaattggaccctgaagatgaagatacgctggagtttctgggatggattcgaagcaaaatggaggagccgtccgaatctgcagagaagcccgtggataccgtcccatcagtctctgaaatctcaattgcacctgttcgtgctagccatctggaagcaatgggtttttggaatgacagtgctgaagctgcggatcaatatgtattggccccgcctaccgatggacagatcgagtcaatggaggagcagttggtgttcaaactgccaacttcctatattaacatgatgaaattacataatggtggtgttccccactatcggtattatcctgtcagccaagtagaggctgccaagaaggtccgcgtggagatcaagggaatactgggtattggacgtgagaaagcacattcgttaggtggtcaagcgggtagccggtatatcatcgagcaagggggttaccccgagattggtgttgtgctatgtgagtgcccttccgattcagagatcgtgatgctggattatcgtgaatccggcaatgcgggtgagcccgaggttgttcatgtggataaaaaagaaggctgcaagatcacttggcttgcgcccaattttgaaacctttatccaaggtctggtgaatgaggaaaatcaacctgcaaaccttcaaggtgcactgtaagtaaaggtatgagcttctttttatacaaaccgttgaaaatgaaaaggctgcgccctaacgaagggagtagcctttttacttaccagttattggaataaatgccatgttgccgaacgatatttttgtcaaggaatgaaaatggatgaattatatttgttataaaaatccaaaataagcatatagaggtgtgcacgttgcataaaggcagttcctctgatattatttagacatctaatatttaattgtataaattttagatgtctaaataatatattttcttcaaggcaaaattgacagctgaattagattcatccaaataaatcaatacgttaggagcaattcacatgggaaaattagataataaagtagccattattactggcggagcctcgggaatcggggagggcatggttgatctttttgcgcaggaaggcgccatcgtcattgcagcagacattaatgaggaagcactggagaaagcaagccaaaaagagaatgtgtacggaatgaagttgaatgtatcttcggatgaggattggcaggcactggcgaaagtagtgaatgaacgttttgggaaaattgatattctggtcaacaatgcaggcatttcttcggagaagccatttgaggaaatcaatgcacaggattgggagaaaatgctctccattaatggcttcggcccattcgctggcatgaaacatgtcactccttatatggcagcccagaagaaaggttccatcgtcaatatctcatcatacaccgctttgattggacaaggctttaaccattactcggcatccaaaggtgcggtacgtgcattatccaaagccgctgcgacgaccttcggacgtcaaggtattcgggtgaatgctctttttcctgggatcatcgaaactccaatgactcaatccttgaacacctcaaaggaactacttgaacgattaattcaggcaacgcctttgcagcgtctgggtcaggctatcgatatagccaaagccgcgttgttcttggcgtcggatgattcttcgtacattacaggatctgaactggtgatcgatggtggctactcagcccaatagcgtgtaaaatgatgacagcccttaagttgaattagggctgttgtttattttttcgaggaggatctaatggaagaacagaacatttttgagcttatacacaacatggataatttcactaataaattgatcatacaatggaacaaatcattcaatgaggacctgggtgtctctcatgtgcttgtactcagccatctccatcaaaatggaaaaagccgaccttcggatattgcaaaaatcttagggttcactccgcctacactcagttatttatctgacaagatggtagccaaggaactagttgttagaatggtagatgaggcggaccgtcgcataatttatttgaacattacagataaaggggccgaagtcctcggaagagcaatattggagggccagaagctgcgtaagaatttgttcgagaaattaaacgaagcggatcgagcgcaattagtccatatttttgagaagatgaatcgggaagattgatcaatagcctggaagggagacagaaggtgatatggaggaaccgctcaaagtatataacaccgcagtagaagcttttcttgaagtaatcgggggaaagtggaagcctgttattctattccatcttacctttggcaagaaacgtaatggtgagctgatgaaactgatccctgcgatcacccagaaagtgctgacgcagcaacttggtgaattgacggaggcgggggttattgtccgtatttcccatcaccaggtcccacctaaagtggagtatgagttaacagtgtatggatggagtcttaaagagattcttcatctgatgtgtaggtggggagatatacacgtggagaatgtatatggtgatcgaggaaaaattctgtttaagccaccaactactactgaccgttgattgacttgtataagccgattctggtaattcaggaatcggcttatttgcattttatttactttacggaaggatcttgcgatcacgtagatttctgaaaatatccataaacatagtctcagtgtcaatgaaatcatggaatccgaagcgtcgagctttggaaccatctgcaaagaaatcgtaatcccatgagaagacaaagtcaccaaatgcccaggaagagacatcatcataaggggtgtttaccaaaccatacttttcaatcatggaattccaaaggtcttctttatctgacatcactgttgcaagtgaaaggggcagtggaggtgctgtttccaattcaaaaaacgcagcgattttgggccatagctcattccagcgaaacagatcgccattagtgatattaaatgcctgattggcacatcgtggatcggttgctgcccatacggttgcatgagccagcaatgttgcatcagtcatttcaagaagcgaatgataagctcctggtttcccggggaatcgtaatggcaagctaagctccttggaaatagacgcatacacgccaataaccatggcaaggttcattggattacccagagcgaatccacatacaacagaagggcgcagagctgaccaggtccagctgcttccgggttgccggtcctcgagaaaccgttgctgatcgacattgaattcagggggcatatgatatgcgtccgtttctttggcaggtgttttgaatggccccagatgtgcaccgtacactttataaccttgcattaggctaatatgttggagatttggagcgatcggttcgatggtattcaccacattgacgagcatggccaggttgggctgtaccaactcggcccaagttggacgatcctgatacgcggcgtagaaaatatgcgtaacggtcgttaaatgactcagtttgtcttgtgtgtctgctttgttcagtagatcagctgatatataacgcaacccaggggcatcttcccctccgcggcgagatacaccaatgacattccattgcggaagtgtcatcagataatcaataaggtttcttccaatgacgcctccagcaccaatgacaagtgcggtatgacgggtaacggattgttcaggtttcaatggacatgctcctctcttcttctgttcatattgtgggtcagaaaaagaaggatgagaagtacgcacctcaaagtgatatacgcaccttgaagtaatatatgagcctggtacaggatatgagcgttataattggcacttcattggatgttacttgcctacaaccacaagaagctgaaaaaggaacaatcgtcctttcacagcttagatgtgtctgtatattcgttcaatagatctgttgtaaatatggtttacgccgggaacccgccacctggaggcggccatgcgccgtagaagcgacgcagcagaacaatctcacccagatggtacgagttatgggaggcgatattgcgcagaagtcctgctttagtttcacccgggaaatagagcagtggatcatctaattgtgcagtttctgcaatggctacggcttgatcaactccatccaagaatgcctgaatatctgccttccacgtggcttcgtcctgtggacccttctcctcaggccagctctcacttacgttagcagggagctgtggcttgcgtccttccaagtgttcgagcatgaattgctgccaataatgcatgtgcttcaccaactgatagatcgtatatggcatggcatcgtgcgtacgagcagcaagtgtgacatcgatatcgggtagagcacgggcgatgcggatatgaccgcgttcccccactaatgatttgacaagggcttgcccaaagctttgattaacatctgacatatggaaccttcctctcttccaagaccggatctgataacctgtcttctatttagtattatacaattaaattgctaaaaattaaaaatggataacgaagaacgctaaatacttaaaatgcctatgatataatagtgaaaataaatctcaagacctcagggtcgaggaggaagctcctgtgaaagtgatattggttgacgacgaacgtctagcgttgataggccttcaaaaatcactagaaaaagaagtaagcggcattgaaattatcgctacatatatgaatccaacagaggctgtggcgggtattgtggagcaccgtcctgatgttgtatttctggatattcatatgccggagatggatggtatggatctgggaagacagattcaggcggcaacaccgggcaccgagattatatttgtgaccagttacgatcaatatgcggtgcatgccttcgaattacaggctttggactatgtgatgaagcccatccaaaaggatcgattgaagcagacggtgagccgcgtaagagagaaactgagcgtcaaacgcgatcagcggtcaaaggatacaaacgtacctttaatttgctgttttaatcagattcagtttaagcttccaggcaaggatgttcaggtggccaaatggcgtacaagcaaggcgcaggagctgtttgcatacttgcttcaccaccggaaccaggtcatccatcgcagtgttctgctggagcttctgtggccgggaatggaagaggagaagacgacacatcaactctacactgcaatgtatcatgtccgccaaaccctgaaaacttgcaatatggatatgatcacgattcagagcgggcacctggaggcaggttatcgactcgaattgggtgaggctcagttggatagtgagcagtgggaacgggaaatcaggcaatggaaagtcatagacgcaagtaccgttcatgcctatgagcaagcgcttcatctatataagggtacctatcttggcaattatgaatacatgtgggctgaacctgagcgggaaagattacgctatctgtggctgtatcatatgagacaattaagtctgtattaccagcagcatgggctggcggagaaagtggtcgagagtacacaacgtatccagcatatgcttccggatgaagaagaaagttattttatgctaatgaagttatatgatgaaatgcacaacgatctcggtgtggaggagcagtatcgtctcttaaccaccagaatggagcaagatttggagataccgatcagtgaggacattaccgaatggtatcaggactggaagctcggtttaaccaaagtcatgaaaaaataattaatgaaattacttcaaacgaaacgtatggaccgttacagatatttgttcatcatgctaatcatttttggagtgttaattggcatgcgctcggtatggtctgagctattccacacagtaaatgagcatcgcgccgttaacggggtgcttgatttgagagatgtggatctggatcagtcccctgtcatgtacttgaatggggaatgggaactttacccggatgagttgctgacccaacaagatattgcgaagaggaatggcggtgcgaagagtgttcaggtcccaggagactgggggagtgcacagaatcaggaacaagagagttcgtacggttacggaacatatcgattgcgcattttgacagatccacttcagacgccggtaactttctggttcaagggaatccgaagttcatccgaggttgagatgaatggacacaacgacgggggtatgggtgaggtctccgcggatagcagtacatatatacccagaagcacttcatatacagcgacctatgatcaggaaggaacaacctccattgaactattggtccgtgtagccaattacgacagtccgcatatgggtggaattagcaaacctgttcgctttggttcacaggcagctgttgatttttcacgttggtattccattggttttcagatgctcacctttctggttctgctcctccacggcatgtatgcctgtattctttacgcatttaatcgacaggaacgttccttgctggttggagccgtattaactttatctgttggcatcacggttacgatgggtcatgacaatatattgatgttatggcttccaattaattatacttggggcattaaaattcgattgatctcattgttactgcaaaatgcttgtatccttctgttattccagagattaacggtggttcatgtacgaaaggcatggctaaagtggcatgttgtaatgaccttgatctatacggccgtgattgtggtggtgcccattcatattacatatgccatgatccattacaacgtcattaacctattctttcttctatctctgatctggtttatatatatcgtcggaacgatgatcttcaggaaacagtcggaccgggatattgtttttctgctgcttactgcaggaggtattacatccaacctgttgtggagtgtggccgagacagccagagatgtgacaacagtctattatcctattgacattatctttgccattaccggcttctccgcctattggttcaagaaatacttcaggaatgccaaagaaaatataaagcttaatacagaactgcagaagggtgacaaaattaaagatcaattcttggcgaatacatcacatgaactgcggaccccgttgcacgggatcattaacatcgctcacaacgtgatcacccgagagaaaaaccggttggatgaacggagcctggaggatatggagttgctgattacgatcggtcgacggatgtcacatctccttggtgatctactggatgtagtccggctgaaggagcaccgcattgagttacgtcaggggcctctttccatacagtcggttgtgcctggcgttatcgccatgctgcaattcatggcagaacgaaaaccggtttgccttcatatggagattccagaatcgttccctcaggtcatggctgatgaagaaaggcttgttcagattttgtataatctactgcataacgcgcttaaacatacagaggaaggaacgatatccgtaagtgccgaaattcgtgaaggacatgctctgattcatgtgacggatacaggcattggcatggatgaggatacacggatgcgcattttcctcccgtatgaacaagggtcgtatggaatcagtgatggacaaggcatcgggcttggactgaacatctgcaaagagcttgtagaactgcacggcggggcacttacggttcgctcggaacttggaaagggctcggtattcagcttcgatctgccactcgcggatgaagccgccgatcaggcgcagtcacaacttcccctgatatgggaacaggccgccgagatgatggaagatgcacctagcggattcctgttaccccgccaaggtatgggggacgtggaagccttggcgacagcagagatggccccgttgttaaaagagggaagagctaccattctggctgtggatgatgatccggtgaatctggatgtgttggtcagcattctttcgacggaaccatatgatataactacagcaggttcgggtcaggaagcgatggaattgctcggcacacgtcagtgggatctgctcattacagatgtgatgatgcccaatatgtccggatatgagttaacccagaaggtgagggaacaattctcgatgtctgagcttcctgtgctgctgttgacggcacgaagtcagccaccagatatctacacggggtttgcatcgggcgccaatgattatgtcacgaagcctgtagatgcggtggaactgaaatatcggatacgtgcattgaccatgctaaatcagtctatccaagagcgcctgcgcatggaggccgcgtatttacaggctcagattcagcctcacttcctattcaatacgttgaattcacttatggttttaagtgatattgatacagagcatatgcggaagcttggcgatgctttttcatcctatttacggatcagcttcaactatctcaatacaggggaactggtgaaattatcatacgagctggaactcgtggaagcttatctttttattgagaaaacgcgatttgaggatcgattgtcggtggtattgaacgtagagccagaccttccgttgcttctcccgccgctatcgattcagcccttgatcgaaaatgctgtaagacatggtctattaagccgcaatgtaggcggtacgttatgcctatccatcactcgccatgagggttatacccgtattgaggtgaaggataatggcaaaggcatggaacccgagaaggttgctgagctactgcgtgctacactgggtggaaaaggcggaataggcattgcaaatacgaaccgcagattgctgcaacgttatggtcagggattatcgattgtaagtgagccgggtgagggaacgatggtgtcatttgatattccagatgagatataaggaaaaggccgcagaagtgaaaacttccggcctttttgttctaattgcgtgttcattccctaattttaattatttctaatgcttctttcatatgttagtatatttaacattagaagcgcgggttccggcattgggcgctaaacgttgttatagtgggtgaagagatcgatgcgcaattgggtcaaaaatgagaatgtgcagatgacggccattgcctttaccactgcggtaggggcgcaattcaagataaatccattccgggaagattacttccgaatcgggctgggggttagcatccttttatttctgctgatgatcatgccacacttgtcttatatgaagacaggaatcctgacaggcatcgcgaatttgctgtttcagtcagcagatctcatcaatcatgtacagacggtgtccatactggaaagcatgcgggacaatctgggggcaggtgtgtattatgtggtctttgcctatgggcttagcaaattcaagcatcgattccatgagatgcagcctcttctgctcggcgggttaatcacatgtatcgatttctcctctaatcttgttgaactgctttttcgcggaatgttaagcgggaccaatatcttttatatgaaggaatggttgtatttgcttgtggtgggcggtctgcgaagttactttgtgattgggctatataacagcattgcggtgaggcagatgcggctcttacatgcagagcaggagaagcggatggagcagatgctgagtgtgaactcaggtctgtatggcgaggtcttttacctgaagaaagcgatgaatacgatcgaaggcattacagctgacagctatgatctatatcgcgatctccgggagcaggacttgaaccaatatagtcagcgcacgctgggcatcgctcagcagattcatgaagtaaagaaggattcacaacgtattctagcgggtctgctgaagctgtatgataacgaaaaagcggttaacatgagcctatctgaagtactgaactttgccagcaaagcaaaccgaaaatatagcgagatgttgcataagcaggtggagatcgacatcgaacaacagtttgattgtgagtctccgtattacattcctcttctcacggtgatgaataacctgattgccaatgcggtagaggcgattgagcatgatgggacgattcgaattcgtgtgtatgagcaggaaggggacgtacatttcgtcgttatagataatggcaaaggcgtacccgaagccaaacgggatgttatttttgaaccaggctatacaacaaagttcaatgaagttggcattgctgcgacgggcattggcttgtcccatgtacgtgatatcgttcagtcgttggcgggacaaattaaggtggagtcggcgcctccgggagagacagggacaacatttgttatagctattcccaaaataaatctgatcaagggggccgatgtcgatgacactttctatcatgatcgtggatgatgatgtggtaagtcggagcatgctgcatgatatcattgaatcctgtggtatcggtgagcttgcgggcatggctgagggcggcatagaaggagcacggatgatcatggatctgcgtcctgatgtggtgttgattgatctgctgatgccggatcaggacggaattgagacggtagggaagctgaagcaatgcggttataccggtaaattcatcatgatctctcaggtggagaacaaggagatggtaggggaggcctaccagaacggcattgaattcttcattcataaaccgattaatcgggtggaagtggagcatgtgctcagcaaagtgaatgaccagtggaagtatgaacgatacgtgctggagatcaagcagtcgatggctcgattgaatctggtggaagcgccggcccctgcccaaggtcgtacggtgcgagatgcggcaagaagcattctaatggatctggggatcatcggagaaagtggtagcaaggacatcattgcgctcatggagtatgcgattgatcagaagcaggtcgcagagtggccgccactgaaggagtcctatgaagcggtggcccagacgtacaagtccacgcccaaagacgtcgagaaagagagcaaggcgatggaacagcgcattcgcagaacggtaattgccgcgttaacaaacatggcctcgattggactcaacgattatagcaaccacaagtttgagcattatgctcccctgtacttcgacttccaggatgttcgaatgaagatgagagccatggaagaagatcagacaggtgacaaaggcaaggttaatatcaaaaagttcctgcttgtgttctatatggagacgcttgaaaagatgaataattgaggcatcatatgcctctgtctgttggaggatatgaaaacccgggaaggtgaccatcggcggtgtcgaggtcaccttcaccaaagacgggcaagctgaagggggtattattttaatccagaattacttctttatctggttgttcaagaaattcgaacatgattttaatttgttccagcgtatttctttccaatgataattcaggtaaagcgtcgatagcaaaaaaatcaactgcgctggtttctacacctgtttccgcatgtcctcccacaatgtcacagcggataaacatcttatatacgtgataaggctcaggtgggtgtccatggaattttttgtccaatactgctaacaaccgcatcggtacaacatcaaaaccggattcttctttaatttctttcacagctacttctgatggtgataagccgatgtcactccatccccctggtaatgcccatgccccatctaatttctctcgaaccaaaagcactttgttttccctgaaaacaacaccgcgaatatcgactttaggcgttgcgtaacctgaatcacttgcaaatgtaagtgatattttctctttgttaacagaagtatagttgcttaagatatcaatactaatgcgcctcaattcctcgtatcgctcgatatcataaacatccttggcataggttaaacctgtttgtgagatagcttgaatctgttttgcccattctagccactttgtgtccatggactcctcttttcttcgcaagtcacgagatttagtttagttaggaaataaccccattatatcatatgaattacagtctataactactaagaaaggacaactcaaatttagggaatcacactaatgattaaacgcactctacaaatattgctttttaatatagaactgcgagatattataaagaaacgatgtccagaggaggagaaagtgaaatgaacataactattgatcaacaaggcaattccaaggtcgccattattgaaagtaatggcatcgtcatcaacaatgctcaagatgcactggatttgatggcttcggtaaggtatagcgatgatgccgataagctcattatcgacaaatcgaacatcacggaagagttcttcgaactgaaaaccaagcttgcaggcgagattttgcagaagtacgtgaactatcatgttaagcttgctattgtgggagatttcgaaggacataacagcaagagcctgagagatttcatctatgagtgtaacaatggcaagcatgttttctttttgaaaaacaaagatgaagcgcttcaaaagttgcataatatcagttgagcgcacatccgaagcatgtagagagcctgcttataatctgagccaaacgtaggaggtttgcaccgtgatatctaatgagaatttaaaggtatatgctctgcctgagatcggaaatcttaaagtgcatggcagaacaactggagagcgatcgccgttgacgttattttggacggggagtgcagtcgaactcaatgtacagggctccgaactatgggttgaggtagagtcacagtatgacatgtatgagtcatggatcagcattctgatcaacggtgttccggtgagcagacagatgttaacggcgggaaggtattgggtctgtgtattccgaggtatgaacgcagatgtggtgaagaatgtacggatcgtcaaagatgttcaagcgatgagtggtgacccaggttgtttcttgcagatacatgcggtgaaatcggttggagtattcctgcctgtgcaggaaaaaccgtacaagatcgagttcattggtgacagtattacatctggagaaggtgcgattggagcgaaagcggaggaagattggattccgatgtggtttagcgccatacataattatacgtttatgacagcagaggcattgaatgcagaatatcgggtcatctcgcaaagtggctggggtgtgctgacaagttgggataacaatccaaaggggaacatccccgagtattacgagcaggtctgtggcttgcttactggtgagcgtaacaaagcgctcggtgcaggagatcagcatgattttagttcctggcagccggatgtggtagtcgtgaatctgggtagcaatgatgggggtgcatttcagtcaccggagtggaaagaccccaacacgggcaaggtgtacaagcagcgtttgaatgaagatggtacttatcatgaagaggatctgaccgcttttgagaaagcggtggaacagttcctgttcaaacttcggaaaaacaatccggcggcacatctcgtatgggcttatggcatgctgggttttcccatgatgcccgccatctaccgcgcagttgatgcgtatacgaaggggacaggagaccacaaggtctcaatcatccagcttcctgatacaaccgaagagacggtaggagcgcgtacccatcctggcgagttatctcaccgtaggacggcagaggtgttagcggaatatgtacaaggactgataggataacttgatacttgatacatggtaatggaaagaccactctttcatgaacgggtaccccaatggttagatggtgtctaactttatggtgtccatttatcacaagaatggtctttcccttttctactcatctagatattcgagggtgtatccgctgtgccggtgttctgtacctcataacgaatcgaaatgatctgtccgagcgtctgggttcggagcagtttaaattgacttggcacagtgcctgtcgggaataaggggatgccttcgccaagaattttgggaatgatggcgacttcaatctcatccagtaatttttttgctaacacagcttgaaccaatatgccgccacccacaatccatacatctccatcagaagtttgttttaaccggggaatgagtgtctctaccgcctcagttgtaaactgtacatgcggagcgggcggctgttccgagcgggaaagcacatacgttgggcgatccgcatagggaaattcttcggaaagtgtgagcacctcttcatacgtataacgtcccataacaacgctaccgattgtttcataaaaggcagcatacccgttgtctccaccatcaccctccacatcaaataaccaatcgaccgaaccgtccagtcttgcgatatatccatccaaactcatagcaatgtacaaaattgttttgttatcagacatgttcatcgctcccttctacaatgtatgatacactttaactatgacaaaagttgacgtagttaggatgttgaattcatgaatcatcgaaaactggctattatgcgcctgatggattccagacaaaagttcaccgcccgggaactggcagaacggttcgacgtttcggttcgtacgatccagcgcgatctggatgcattgcaggcgctgggttttcccttgtacacagaagttggcgtgaacggaggatatcgggtgttgcccaatcggattttgccacctcttcaactgacacagcaggaggcattagggctgtttatgatgctggaatatctacagcaagtaccggattttccgtatggatcaatgcgtgaacatctggctgagcagtatttttctactttgcccgaagatgtacaggatctgattatgcgaatgagggaacacattgcttttgtccaacatccaggtgagcatgccgagcctttaacaacagcgatattgggtgcagcggtagaaaagagagaaatcgaatttatgtatcatgcccgcagtggtcctaaaaaagtccaggtctttccctatggcatctactatgagcagggacattggtacatgccagcccggaataaggaccgcgtattattgtatcgggtggatcgcatgcagcagttgacggttatggaatcagtggataaatctgttccaagtctaaaggcatggttagctgccaaagaagatagagcaagcgtagaagtggtgctgcatttcacggaatttggagcgaggattgctgcgtcagatgtattgttcaagtcggttcaagataacgaatggcgcggactggttccgcctgaggagttttcttttacagcccgaaaattactctcctatgggccggaagtgaaggtggtgtctccgctcgaactgcaacagcaggttagagggatgctggaacggagtttaagtcagtatggtgggggataagagctttcaaacgctggatattagggcatcaaggaagagataagaaaggtgtgtagataaatgagcgaagtttggactaaagacatcatcccaactgtatctgataaagtagtgattgtgacaggttcgaacggcgggttagggtatgaaacggcattagcgttagctgaaaaaggcgcgaaagttatccttgcagttcgtaatctggaaaaaggtgaaaaggcagctaataaaataaagtcgtctgtgcatgtagctggagaggtaatcgttatgcagctcgaccttagcgatttagctagtatccgtaagttcgcagccgcttttcttgagcaatacgattctttgtccattctcgttaataatgcaggaattatgaaccctccattccagttgacgaaagatggctttgaattgcagtttggtagtaatcatctaggccattttgcgcttacgggtctactattgcctcgattgatctctactccgaaatcgagagttgtcactgtaagtagtatggcagctcataatggtgcgattgattttaataatttagatggctccaaaggatatagtcccatgaagttctacagtcaaagcaagctagccaatctgatgtttgcgagagagctgcagaataaatttaattccgcccatattgattccatgagtatcgccgctcatccaggaatttcgcataccaatctattttccttcggttcggggaaacagaccaatatattcatgcgcagtcttttgaaaatcattagtcaaccggcacgtatgggggcattacctaccttatatgctgcagcagatccgacgatcacgggaggggagtatattgctcccagtggtatgggtggcactaagggctatcccaagagcgctaagatcatcgaaaaattatatgacgctaacatttcaaacaagctatggagcgtatcagaagaattaacaggggtatattacagattcgacgtgtagattttgccattaaggaaagtaaaccttattatggtatagacagttaaaagttcttcagcacgaataagattaactgaatggggggctaccatgattcgtttcataagaagtttcacgatccgctctatgcagagtccatgtgatgaacaacggcggttgtttgcatagagcttgaaattcttttccgccatatcattgtagtgcatatccaatgtgttcattgtacgactctgctgccttaaagattttaacttttaaggagtggagcaacgtgaaatatattaatgcggatacaatcttcccggaagaattactcaaagaaatacagcgtcatatctctggtggcttgatctatattccgaggcccaaggatgcccacaagaagtggggcgagaattcgggtggcagaaggattgtccgggagcggaacgacgagatccgccagctttttgctgcgggaaaaaccatcgatcagcttgcggaccaatactgtttatccattgatagcatcaagaaaattgtgtattgcaaaaagggatgaaactatagaagccatgttcgagcaatcgaatgtggctttttcctgtaagaataaagaatagttattaaagcttttttacatattcgaggttgttgattacgcgtacaattcatttgacggtacaaggatatgcgttgagagttcttgaaaataactccttaaatcatctggtaaggttggtgaatatgaataatatgaatatagaagtgaaattaacgaataaagacgaggcgtatgtgattaaaaatatgtacccgctataccttcatgatctatccggacattatggtctgggtggagagcatactccgaacgaacatggcatttttgagccaagtcctgattacaaaacgttacaggatcagtatgatgtacagaacatttggtgggaaaaaccggagtgtctttatccgttcctcatgattgtggatggcataccggcaggttttgcgttcatagctactccgccatattgttcacaaggcacgaatttctttgtacatgacttctttctgatgcagccgtttcgaggtgtaggcgttgctgaatacgcggcatcgacgatcttcggcatgtttataggaaactgggagttgttcaccaatccatcggagaaaaataagattggccaatctttctggcgaaaaacagtggataattataccaaaggtaactatcgggagatttacgggcaaacgttcgatggttataaattgatttttcaattctccaatatataaaaagagagaccgtctccctttgcggaaaatgatctctctctactgccttttataaactaccgttgaaatagtgatactcagaaattacttcaaaaccaacactgcggtacagattcaaagcacgtttgttctcggtaacaacggataagcggatatctgtataactttgtttccttaggagatcaaccaggatgctaagcgcagtgcgccccagtttctgtccctgataagcaggcaagatacagaagttatgaataaatgcggttgttgcattaatggagttgacccgtaccagcccaacaggcagttgattctgccacgcaatataggtgactcggctgggttcattcgtttgcataaagtactcgcgtgtccagtcctccgaatctccaaaggcttgggaggagcaagtgaccataaactccatatcctcggcttctgccacggacaacgttagttcaggtggctccacaaccgaaaggacctcattcacaagttgcatcgagtactccgcacgatcataaatggctccgagggattgggcagtatgaacacccggagataatccctgaggaacgcgataactgagttggttgattccttgtggtttcatatccaggatggccttgttcagtaggctgctgaatacaccttggcgacgaaaatctgggtgtacgatggcattaatatttcccgttacgccgtcggatggataccaactgaggagtcctaccaaatcacggtggcgataacagaggagtgcatggtctccgtcttttttgccaatatggtcaaggtctgctttcaaatgaatggaatcaagctgtttacattgttgttcgagtaaaataatagcatcaatctgttccttggaatcatagatcataggaacgacttgataagttgacatagctttcacaccttcattgttgaaggaaacacgcagttattggacccgcaggcgctgtccttcgagagttggtccagttgtaattttgatcatcatcattatctcctccaaatcacttcccgatgactataacacaatctatgatgaagatgacacccaatggatgtaattcactgggtgtctgttcagatgttcctaataactggacattatatcctattgaagggataattgagagtaatactgacgagaaaggagttgatcacctcgcgtaagttagcttatgtgatgagtacgttgtttctttcatctgtcatgataatggggtgcaccccatctgagtcagccgagaacgttaaagagaccattccaccagcgacgaatcagccgagtattgtgagcaatcagaaggcgtcagccatagatgagcagcaggccctcgaaatgtcgctggattataaaacaaccgaactgactgttgattataaggactatgaagatacgttaactgtggagggtctgctggctagagcagaagtaatcagaccatttttgacagaaaggaatttcgaatccaatatagatgcgcgatttaacaagattcctttacgtgtagcagacaaagagaaggctctgctgcatcctgaaaatatacaaaccaagatcaaagatagcaagagtgactggattcttgtggaatacacgctcgatttgaaatttacggataaggatggcaaagagttcaagtccattccgttatcgggtgatatcacctttttgcaggatcagggagaatggcgcattcaggatgacacgtacaacatgaagcccttcacagaaatcatcaataattcactataatgcatgagtcatctgtgaatctggcacatacagattgtgctcgaattattcattgcgaataagatccttcatatcagtatgcacttcaaagtgtgtactttttttgtggcggcgcacccagctaagcgcgcgtcgtcaaaagggtatcatcgcgatgttagctatcgacacctgctagaaatttgcagggtacattctcctgtattgatgatattatttggatgatcaacttacttattgcgctcttgtagaatggggttgggttcatcatgagggagattctccgagtcggttctcgtaaggtttggttgtatatcattgctgctgttattggtttggttacaggctatgtcgtcctctcttcgccggactctcctaggctccaaagtgaagaaggtattctggatttaacgcaggctcaacttagtacgaatccgcaaaaattaacagggaagtgggcgttctattggcaagaactgctgtcgcctgaggatatgcgggttcgttcggcaagggaaggaaatcaggaccactggattaacatcccaagctcctggctgggctacccgttagaaggtcagcggctgagcggtacaggctatgcaacctttggactggtcgttcatctaagcgagcaggatcgcgatgagatgcttgctctgcggctgtctagcatttttaatgcgtacaaattatgggtcaatggcgagctgctggcagaagttggtgaggttggtcaggacaagcacagcatgaccccgcaattggaaacaaagctggtgtattttcagcctgaaagcgacacgttagagctggtcatgcaagtatccaacttccaacatcatcggggcggcattaccaaggatatcgagctgggtggcagtgacgtactaacgaccaagaccaatctgaatcttgccagggatatgttcatcacggcaagtttgctagtgatcggtttgtataatctgctgttgtttatgttgcgacgtaaggataaagctccgttatattttggcctgtttactgtactgcttggtattcgatccttgttcaacggcgagcttatctttacacaatggttgcctcattttccttgggaattgcagttcaagatcgaatatctgattctttgcctcagcggttatatcatcaccatgtattttgattgtatttttccgaattatgtgtcgcgatggtttcgccttggcacccggatcgtaactggtgcattctgtatccttgtagtggtaacccctgcaattatatatacaaaatttttgctggtaatcggtgtgatggtagttctacatatgatttatctgatgatcgggctggttcaggcggctgtgcgacgtatggagggagcgctgatcttcctgctggtgtcggtggttactttggtcacggttgtcaacgattttttgtattttaacggatggtcgctagttggaaatacatctccgcttggcttattgatatttacgatcgcgcagctgattctgctgtcttcgcgatctacgaggacggcatcgaacgaagagagaattacacgtgaattacagtacgttaatgacaagctgattgaaatgaatatgaatctggaacagaccgttcaggagcgaacacaggccttatctacagtgcatgatgatctccaaacctcgtatgaccgactgcttcactccgagcaagggaggaagaagctacttgcttatattacgcatgatctgcgtatgccgttgtccagtatgcttggatatgtagaagctatacaggacagggtcaagccggaacgcaatgaacaatatctgaagtacatccgggagaacacgataaggattaaccgtatgatcgaggagttgtccttcttgtctcatttggagactggacaagtctcgtaccgaatggagccagttcagatgattcctttcttgcatggtttttttgaacaatatgagttggtagtgcgcgacgcaggattagacttcatactggatatcggagatgccgaggatagacgatctattttgccagttgtcgagatggatgcgaaaagaatagagcaggctttatttaatctagtgtcaaatgccatgaagttcacctccagcggggggctggtgcgtattgcactagttgtggaagtggtgaatcatgctccccatgcagtcattagcatacaggattctggaatggggattcctccggatcagcttgagcaaatcttcgaacgtaattacagatatgatcggccgggaatgggcatagagggcagtggactggggctggcaatttgcagggaaatcgtacaagcgcacggaggaatggttcgagcggagagcgacggcaagatgggggcgacattctatgtaacgtttccttgtacggtgattgaaggaaaggggtgatgagatggacacgcacaaaatcatgatcgttgatgatgatcctcatatatgcgagattgtgcaggtgtattgtgatagggagggatttgtctccacctgcagtcatagcgggtcagaagcgatggagctgcttgcatcgtttgagccggatttaattatactggatatattgctggctaatgaaaacggtattgactggtgcaggaatgcgcgtaatctcaccagtgcgccgattgtgtttctgagcagtcaagaggaagacgaaataaaaattagcgcattatcctatggcggggacgattatgtgaccaagccgttcagtccgggagtgctcatggccaagatcaaggctcaccttcgcagagtgtcgacgggtagaagggaacaactgctggagttaccgggtttgacactggatttctacacgcagtccgtcaacatgggaagtacatctatctctttatcgaaaaaagaattcagtctgctgtcctatatggcacaaaacgtgaatcgtgtcgtcagtgtcgatacgttgtttcaaatcatctggggaatggaaagtctggaggatacgagaacggttgctgtacatatcagtaatttacgcaaaaaaattgagtctgaccctgccgaccccgagcgaatcattacggttcggggtagcggatatatgctggtttctaacagtacgtcacaagcatgaatatagcagtaagggtagtctattataaatgggaaaatggcgttggagcagtatctgacgctattggcccattttttgttctttccactagcttcgtaatcgactcaagatattgaatccctcaacaccagtctgcggttttccatcctcgtcaaaatgatgtgccatctctccgaaaaattaaacgatccaatacgcacggatttaaagttttctttagatttctcaagtaggataatccatcatgataaaatcactgtggtcgatataacgacatatttcatcaaattgcaactgattattagctacgaggacgttacattcaagccggatcaaacgataatacgtgaagaaatggttgtcttgctgtcccgcattagtacttgaagagaaggaagtggctccgatggcacgagttatatgtatcacatcagggaaaggcggagttggcaagacaacggtcacggctaatctcgggactgcccttgccttatcggggagcagcgtttgcctgatcgacgctgattttggattgagaaatctggatattccgcttggtttgagtaatagggtaaggtatcatatttctgattttctgacgggtcgatgtgctttacatcaagtgatcgtcaaagataagcgaatcagtaccttgtcctttatctcctgtagtaacgacacggtgcatcacgatgatccgcaagtttttggcgaggttgtacagcaaatagcccagaactatgattatgtgctgatcgattcgccggcaggcattgaaaatggattctggaatgcggctttggcagcaggtgaggctattgtcgttactacgcctcatcgtacatcgcttcaggacgcggatcgcgtaatcggattattagaagatatgattccggctccgccacagctcatcattaatatggccgacggacaggaagcccgttcggcaacggtaaagatgcaggatattatcgatattctcaatatcggtgtgattggcgtgatccatgccgatgtagaaattatacgttccgtacataagggcatcccgattgcgcttaatcctgattttgaaagcgggctgcgcttcaggcatatcgcccacaatgtggcgaagaatcagcaggagccttttatctcattgaaacccaagaggcatattagtgttttttcacttcctccaagactgcgttgggggaagagtagttcgttatagtcgattctggtagatgaatcgttgggaagagaaccatctggaatggattgcagacgagctaaagaattcatgaaagagtggtgtgggagttaccttccctacgccgctattttttgatgtcattgatgttctcacttgcgagtagttgcttacttaaagttttctttataattcacaagcgcccctatctcgcatgataaaatacggaagaaaaaacgacataatttgctgtgtcggtgtcacaattcgactgcgactgatcaggaaggtcggtgaacgaattcaatctgtaaagtttttcctcgcttgatctccacgtgtcgagcgaactgactcgcaggaaaccaatgatcccgatctgggtcagtggtatccgctattagtctggctttgttgattagcttgattagaaaccaattttggaaggtcttttttagtttgatctatacatagaagggatgaatgaaagtgaagaaagtaagacagggatggaaggtgagccggcagatcctgatgtggatgctggtgatcagcttagtagtttctgccgtgcccctattaccagcgcaatcggcagtagcggctgaactgccgatgcagatgacaaaagtaaccacatctactggattccaggatgtgagtcccaccgactggttctatgatgcagtcgtccatgtgcaggagaagggcatattcagcggaacgaacgcgagtagcttctctcctaaggggacaatgacacgtgccatgtatgtaacggcacttggacggatggcgggagtcgatgccggggcgtactccacttcgagctttgccgatgtacaggcgggcagctggtatgcgccatatgtcgaatgggcggttaagaagggaattaccgatggcacgggggatcggaaatattcgccggatgctaccgtatctcgggagcaaatggcgacgatgacgttgcggtatttcgaaagcgaacagatcccttatcagaccgagaatccggtcacgacagagccgggcgatctcggggatgtatcgccttgggcggctgacgcggtcatcaagctgtggcaagccggtgtgttcaccggggacgaaaaggggaacttcaatccgcgtgcacaagcgactcgcgcggaagcagcggttctcttcatgcgcaacaacgcggttgtagaggcgtggaaaaatcagaatcaaacgccggtgacgcctactccaacaccaacaccgacatcgccggtgacaccaacaaccggcggtaatagtggtggcggaacgcctggagataacggaggtaacccaggcacgggttccactgcgtatacgctcacgtttgagagcaacggaggcacggcagttgctgcgcagacggtacgaaaaggccaggtgctaaataatctacctgctccaacaaaagaaggatatatattccaagggtggtttgtggatagtgatctttcactcatcttcgcaagcggcagcaccctgaacgcggatacaaagttgtatgcaaagtatacggatagcatagatcgtgcagtacagagcgtaccaagctattcggtactggatgtcgcgccgaacttcaccattaaggtgcaggattcatcgggcagtctaacggaatcccaggtcaaagaggggatgaacttcgtggatacggcgaatcccgaattcgaaggggttaccgtctctggcgggaacggagttttcacggtatcgtcagcagccgaaaacggcaagttcgttgaaggtaacacatatcaacttacgttgacggatgacagcttgtccttccaaggccaagacgcgacgacaagtatttatgtatttagcgttgctaaacaagaagtcatgaatgttccactcaatccgaatatgatctacattccgttcacggatgtcacggatatggtgataaatggagcagatgtcgattcgcccgcgatttcagtcgttactacgacggtaggtggcgaaaatgcactcgccgaagtgaatgcgagtagtggaacgttcaagtacaccggaagcactggcacggtaattcaagtcggtgataccgtagccatctatgagggagttagtcccaaactgcgcacagtcgaaacgactggtgaagacgatggtgatgtggcctatgtccagatcacggcggtagatggaagtgtctacacttatgatcacgcagatgccaatcaagtgttgttcaagccggatgttctaccggtgagcatagaagcagataaggatggaattcccaataaccattccatcacggttgagcacactgccatgaactacagtgacagcctgtacaagccctttggtttggatgagctgaccactgttgatgtgggcgactttattggtttttatgatggacaattcgatcaagaaggtattgagatcatgggttatggacgtattacgtcgattacgcctgaggcggagatggacgtaattacgtatgaagatgccaccattgaagatattgaaaatgccttcaacatctatcagaagcaagcaattgacggcgacgatctgttttcggaagaacagattgcacagctcgaagagcaaattgagcagcaagcgagagacagcggattcgtcaatgaagccgcggattatctgtctgacatcgccatggagacgaaggaaattcaggagatcaaggctcagtcctccctagcgtccagtaaagggagccgggtaagtgtggagaatctgaccgtttttgcttcactcggcacgaggctgaagaatattgacggccgaacctcaggcgtaagcgttacattacaagtgggtgccgatattgttgtcaatatcaatgaagacagcgatcttgtcatccatatgacgggtacattcgtgcaggagatgagcctggacctcggtatcaatggggatatgaaagggcactggctgaaaaagtgggggattccttactggtacagcattgatgattatgtaattacggcgaatctggatgcttatagctataccgggatgaacatcacggcagagatagctctcgttgaacacgataagttaaatgatgcactgaatgactgggtgggcgagaagaacgctggcaggttgggaaaggttcagaacattgcgacacagattaaagcggtaatggcgggtgtgcaggatactgccgtagatgcggaatcgttgaaggaaaagtatcaagagatgttggagcaagacacggagtgggttccgttaatcaagaaagagctttttgaaaagagcgtacgcgtggctttaggtattgtggaagtcaaatttgaagcggagtttgtggtcagcgcccaggtgaacctgacggtgggggcagatttctactataagatggcgaagcgctactcggttagcttgcgcgtattgagtttcagtggttcgagcaatacggtcagcttgccgggagacggagattaccaatttaccttctatgtgatggggacgatcggtttacgagctggtattcatatggaggtcaaagcggggattggaagcgtcaagttgaatagtatcgggcttgctgtagaacccggtgtgtatgtgaatctttggggctacttctattatcaattgaaaaatattagcggggtgaagaccacgaagtctttaggtgccctgttcgtcgagattgggatctatttggaggtcgaactcggcgctcaattaggagatggagcgctttccggcggcgtggagctggtcgatgaagagtggccactgtatacgattggagaagaacagaacgtctacgacttcgcctatccacaggataagtcgctcaaagtgaacatggcgggttctgcgtcatccatcgctgtaccggagttgtgggtcacgatgaatacctttgatttgaagacaggcgatacggatgaacaggcgtatgatcgctcgaatttcgatattcaggtggacaatccaaacttcaagtatgacgcagcaaacgggatgattgaagtggtggacaagaacattcaggtgagtgatggcaatctggttatcacctggaagggggcaccggcgtcgttcatgtccgagccactcaagcgtacgattcagttaagctggcttgccagagtgggtgactacatccttcagctggatccacagaacagcggagtgacccaggttgtggcggctccttataacgcgccaatcagtgtggtcaccccggtatatccaggatacacctttgacggctggtatacggccgcttccggcggcacgaagatcacgattccgaaccgaatggctgcggaggatcggaaactgtacgcgcactggattgcgaacaagaatacgccgtatacggttgagtattatgtgctagacccgaacagcagaatacaggctccgcctgtggatactgaaaataggactggaacaacggacacagagattcgaatcagctccgacaggtttaaggagcagggctatgcgaccggaacggtaagcggcgtattaatcaagggagacggctcgacagtcgtaagagttaattactatccggagaatcgaaagatgaccttcgttgggggttatgccggtgcgccccaaatctcgctaacggaagccgttggcaagaacattgctgctcgtatacctgtgccgacaaggcagggatatacgtttgccggttggtcgccagaagctccaagtacaatgccgattgaggatactacgtatacagcgaagtggacggggagagagggtacgccttatcaggtcgtgtacttgctgcaaaatatcggaagtgacacctatacggttgcagatacggaatcgtatcgtggagttacgggtaccgaggcgaatttggcggatgtcaagccgagatcctatgatggcttcgtgcgggacgacagcatttcggtactgacggatctaatcacgagcaacggcaaaacggcgttgaaggtatattataagcgtgatgtataccaaatgacggttgattataacggttctggggcaacaaataaaacggataatgttcctttcggagcgacgatgctgttgcgtctaggcactccgacatggcagggatatagctttacgggttggtcgccaacgcctccgaccacgatgcctgctgaagatgtccagtttaccgctcagtgggcaattaacgactacactgtaaatttcgacagtaacggtgggtccgaagaagtgccggctcagactgtagggtttggcgccacgattagtacgccgactgaaccgacgaaagatggttatgtattcggcggttggtacagtgataacacgttgacgaatgcttacgacttcgctacagcggtgacggcggatctcacactgtatgcgaagtggctgatcccttacacgataagcttcgagagtaatgaagggtcggtagtagatgcccaaacagtgaatgaaggcgtcaaggctatggctcctgcccctccgacgaaagacggctatgtgtttagcggctggtacagcgatagtgagctaatgaacgcctacaatttcacgactatggtggttacgggagacctgacattgtacgcgaagtggacggtatatgtaccgattacctacactgtaactttcgagagtaacggcggatcgttggtcacagaacagactgtgaatgaaggtgccgtggctactgctcctggcgctccgatgctggaagggtatacgttcgatggctggtatagcgatagcgaattgatgataccttatggtttcacagaaggtgtaattgccaatgtgatgctgtacgggaagtggacaaagaacagctacacagtgagcttcaacagtaacaacggatcgtcggtgagcagtcagtccgtgagtgaaggtgacacggcagtagttcctgacgcaccgacccgtgcagggcatgtatttgaaggctggtatagcgatgctggtctgaatgaatcttacagcttcatgacacctgtgatgaataacctcacattgtacgcgaagtggacggctatatatacggtcaccttcaacagtaacggcggatcactggtggctgaacagaatatgcaaaccggcggtaatgctacggagcctgccgtaccgacgagggacggttacgtgtttaacggttggtacagcgacgctggactgaatgaagcctacagcttcacgacatcggtgacgggtaacctcacgctgtacgcgaagtggacatttaacagccgcacggtggactttgacagtaacggtggagcagcagtaggtagtcagacggtggttactggcgacaaagctgtggcacctgctgcgctgaagtgggcagggtatcgatttgaaggttggtacagcgatcgcgatctgaagatcgcctacgacttcatgacgccggtgacgtcaaacatcaccctgtacgcgaagtggacgatgacatcgtggctgcaagtaggtgacttgttggatttgaatagtaagtccaatgtcatcttcgacagtcaagggactccttacgtggcttatataaaggacaattacgaagtgtttgtgatgcaatttaagggaggcaagtggcagtcctttggcaatcaaagcgatcttgaaaaagcgggaggattagggagctcagctatatcgctcggaatagacagtaaggacaagctttatgttgcttataagaatagctcaggtaaagtaagctttaagaattataatgatgaacataagtggtggagaccagtatctactatctctgatttcagttggaatgatggaaagacgagcagaaaagtggataaagttaatgatagcttcttcattaccttcgataaggatgataatccttttctgatgtttagaggtattttggtcggtaatgctgcggaaccgtcaatgcttatgtcatggagttatcatgaaggtagtggatggaaacaagaagcgagactagaggcattcgcaggtctaagagccttcctcgcaccattaccaaacaacggcatgtatttatttgctccattcaggttaactggtacccctgtggcaaaaggatatagcttggcagatggattatggaaacaattggatggtaaagcatatctaataactgcaaatatggatgctgcatccgcgcttgatccatctggcgtaccttatatgatctatcttagcagctccaatggtgttgaaatgtggaaatatccgcactcgactccgtcagaagatacgacatgggaaaaggtgaacacttccggattctcggtcggtacatctcaagaaggaagcatggatatggcctttgacagcgaaggaacgccttacgttgcttatcgagatgcagcagacggcaacagggtgactgtgttgaaatatgagaacatggattggagacccgtagggtctgccggattctccgctggtgacgttcttcagctagacatcaccatagacagcaccgataacatctatgtgagttataaggaacaaagtaaaatgaacgtgatgaagtttgatcctaatttcaaataacttttatagatcaactggcagaagagcctactcccatcggagtaggcttttttgcatatattacataactcactatatttcatgcagcgtttgtgtctctgggacgttatgcacaccccatttgcagatttcctccagaatgggaattagacttttacctcggtgggttaaggaatactccactttgggcggggtttgatcgtactcaactcgttttatcacaccttcacgttaaccgcttcttcagttttgaaccctgaaaagacggcctttcccgagatctaaattgcagatgtagatggctcatcctcaactccaattatcttgcttagaaattggttcgcccaaacgtggcatcactcttcacagttgcgctgcgctgctggctgcatttacagcatccaactgcaaaacataatcataatgccggatgtaatatccgggctgactatacgattgaagggatactttggtgctgtcagcccaaccagggctgcttaggaacgtagcatctcccttataggctgcagtgtccgcatatgcttcaagtacaattttgttgctggtgttgcgcttcagaaagtaacccgggaagttgatggactccagtgatattcccatggagctggcaagacccggtacgacgcggaactgtgaatccagaacaggggagacgttggcatccacgcgagccgtgtagttggcatgacggatgtatcgatccggaacgttgtgtgaactgaaccggctgtaacctgtggcttctggtgttgcaggacccaacattttgacttcgtgcagagttggggtgtaccagttacccggattattccacaagaccgcgttcaccatattaatccgcacataacgggctgtgaaatgcacagcatcggtcgtaaagccataggtcagattgttggtgcgatccaaggtggagtaattaactccatcgttgctaatttcaattttgtatttgtagtatccttcggaacctttatacataaaccaggacgtgtcgatctcggtgatcgtcttcggtgcgccgaagtccacctgccaccaggcaggccagctattggaggaagccacccatgaagtctggtagttgccatcattgacgttggatgcagacgaaccggaggctgtggagctggcggtagctgttttgccttgtgcatgattgacgagagcaggcggtgttaccgcacccgttactgcatcgatattccacgttgtataccactccagtgatgcggttccgttcgaatcattcaaggttagcggcagccagatatgtttgtgctctccgaggttcatcggattccagcgatcccccatgtagatgtaggatgtggtgttgctgcctgtaatcgtggcaatatcatgaatctgcgaaccgaaggcagatggattgccatatggcgtaagcgcagtccatggacccgtcatggaagtggctgtagcataagcgccctgattcggataccagccagcggcttgagaggtgaagaggtagtaacggtttccttttttcacaacagcaggcgcttcacgataggcattctcgaacagccaaccctcgaaggattgtattccggtataacttgcattcattttgaaaatagccatcgtatcattggcaccgccattcttgcgtgaagcagtaaccagataacctgatccatctgtatcaacaaagacagtcatgtcacgggattcataattcattgggcggaaactgccctcataggtgaatttgccattcggggtattacttgttgcgaccgctacacgcccgaggttgtagtccgtactgttctcatagtgtgcccagagcacatactggttggtggaggagttatagatgactttggggcgttctatcttgctggaggccagctcggttgcggaatctttcgtcagaatagcgttgctgaaagtccagttcttcagatcagtggaagtgtagacgttcacgctgtcaaacctgccgcccaccgcatgttcaccgtacagataatacgtcgagcctacctgcagaatgttgccgctgttcgcatggatggggttacctgcggtatcgagccaatcggtgccgttggttattgtgacacttgctgcgcttgttcgttcaggatgaagtccaaacagggtgaacgtgagtgcaaagaccagaaaccagacggctttcctgttacccattacatacacctcccgaaagatatcagattaaatgtagcgctttcatttatattgtagttgggtcagactctttttcaagtgaacaatccatccattgctgaacaaaccttcatttcatcgtggctgagcggtgagagcggaggaaatgttcctaaatatcaagtacgatgatgtagagaggatcaggtgcacacgttaaaatgaggatagactaattgttacaacagatctggagggggaaccatcatggacaagtttattgtagatgaagaccttcaagtgatattgcaaaatgaagaagatggaaccagcgctccgattaagggaggcattactgctcaggattttgaagtcatctctacttatcaaaagggatggttgaccttcgcctatctgcgtgatcgtcagggaatatggtggttcaatgcccgcaagaataaggcgagtttgttcagtcgggatacggaagcttttcgtgtgatcgatgaagattactgctgcgactctcagtatgtctatctggaagatcaggccgtgcctgactccgatccgaaaagctttcagctgttgccggatacgccctactttgctcaggaccaacgttatttatatgtgaagagcagccagcattttcatctttttgaggatatcgatacgaactctgtgattgctcatcacgactattgcaccgacaaggaccatctgttccatctgtccagctctcttcgttatgcgaatggggaaaaggatgaggtgagggcatggctgcaagaacatcatcccgacgtacatggctggtggcatgtgcattatgcccacagtgcagagggcgctacgcagatcacaggcaattggtatgagacagagtcgtctattttttataaaaccgaatggggtggtacgtatcgtcaagaagcaaaagctgtattaaaccttgttcgtggagcggacaggtctacctttgaaccgctggacgagcagtttgcacgggaccgggaacgtgtttattttcagtggcgtactgtaaaaggagcagacccggatacgttccagtcactaggtggatcctttggtcgtgatggcaatcatgtgtattacaacggttaccgtgtagatggagctgatactcagcactttgaaacgtatgccgggacggagcatcttggactttccaaggatcagcaacatgtgtaccgtgccgaggttgttcggacaagtcagcctttcggtcatccagacgatgtgcttcagatgatcaagggggcggatgcatcgtcatttgagttaataacgccttccgggagctgggctgtggatgccgatcgggtgtatctatggggtaaaccgaataaacatatcgatcgtgccagctttacacatctattcgatgccgatccccagagttgggcaatggaccagaatggtctatataatgccaatggcaaccgcacggtaaagggcgtgagcggcagtacatttgtcatgctgaatccatattggggcaaagatgagcatgtggtgttcagttttttgacggggagtgtatacaagtcaggagatgcagcgacgtttcaggttacggatgattacgggggcgcggaagatgcgctatttcggtatacggtggaaggcggtacagtgcggaaaaagaagaggtgaattgaacggtaagattgcgtgttcaaaaagactggttttcagtacctaaaacagccgcggtctaagactttacttcaagtcataaactgcggctgtcttcattttagggtgagtctactgttactaatctgtatctccagataaactatttataattatttagggggcctttatccatttcaacttctaccatctttgaagatcccatcttgagcttaggtctaaactctgaatccggtttactgtaaagctccagtgggctaataattactccatctggtgtattatgaagaattccgggcacacaggtataaatccgatcgttattatttgcattcttagcggatatcgtaacggaggttccattcagattatctatactcatggacaccttgtatctgtagaatgagcctgatccattggactgagctgaataaaccacaggaacaactgcaagaatatcatcgtttaaccttaatttaataacttctgtcttcgttgattggctgcttcttccaacatcacccatatgttcaactatccctttaccataacttttgaggggtggggttcctgccgctccaaacattgctacatcgatctgctcaccattctttgtgtagactaaagcgtatatatcataatctgtcccagtctgccaagatacagtcgctgtaatttccggtgttttatcaatgataacggatttctgccctttaaccagattgatatttccctttaccttttcgaggtttatcgacgataaggtttgtttactattcttattttcaggaactgttacagttggatcaggttctgttgttattgaattttgagtagtctggggttcggaaagtttgttctgctcatccgcttcaacctcaacaccgtaaagtttacataacccttcaagcccggaatcaaatccacgccagattgcttttgcttttgtctgaccattccttaaatataattccaatacgacaattccattttcattggtgaaactggatggggttaactgaataatcgtctttccgctatcgatctctgctgttaaattctttacatttgaaaatccagtgctgttatcctctgtaagggttatagctattttggtaataccttcaggaactttactcatatcaaaattgattttatgtacttttgtattgcctactagctcagatggcatgagggtagctacacctgatgaagttgtaggttgattataaaatatgattccactatcaccttgtactctatccgaatccgttaaaaggaatgctgttaaagaaatatctatcaaattagaaatttcatggctaattataacgctaccttttgcagcactcagggttgtgtttgctcccatttgaagaaactgattcatttaaaccactccattctataacagttcttaatataaatagactctttaatagtgccattaaatcaatacatactcaataattattaggcagagtgaggtactctgcccgctttgaagttatattatctacggtaacaggcattttcatagaaagtaactcaaggaaacccctgttccacaaaaatactgtcacttttggtacagcgtaggatcatttcagaccacaacattgttatagtcgtcaataattgaaatcgttttatttgctacttcactaccgagggaggcatacaatttcttatcgccaataatataaaattctttttttgctcgtgtagctgcaacattcatcatatttggaacagagacagcccatcttgccgccccactgctatcagagtcagccccaagaacaaagtagacaatcttggcctctttcccttgaaaagtatgaacagttccaatgttcgttgtttttccattttctcgttttgtgaagttaattccatctaatacttgtacaagtttattagccacattgctaaatggggtgataacataaatttcatccgctaaattcgggtcttcttgcaaacgtttatcaattagacttttcagtaaatcagcttgttctttaacaaatttatcatttgctttccccgttgagtcataccaccgtgatttaccttgtgactcatcttctgatttaccttgtaccatcaaatcgtcatacgatattttatttgagatcgtaaacatcggatagtccgaacgtctgtgcacccaaagaggtataccaatccattcatcctcatttttttgaaaaccatactgacttgtggcatctacaatggtttgagtagaagcatcagcagagacaaatttttcatcaactttgtaaattcttccgatcaaggtcagcacatttgaatctaacgtcattactggttgtatttgtgatggatcgccgaccaccataacctttttgcttctatagattgcgccaacactagcttgaggtagtgcttgaccagcctcgtctatgaatagattgcctattgagttttcattaagatttttaaacattctcccaaaactagcaaaagtcgtgctgataacagggatagccaaattcaaccattgccatgattccgaaattaactgaagtccgttctcttttccaatgtattcagacggtttgctccagataatcctcgcggccttcaaactctttctgttttcatacagaaattgctttctaacttttaaagctgaaataaacaactctgattgtaatttacgaaattgtattgtaaaccatgggttagacttttgaagttcatcataggatagtgaaaaatctagttccttaatgccactttgagatttgaggttttccagtactgcaatttcttgtaccaattttactaaagcgttatgttgagtagtcatccagtgttcgaagtctgcttttgtgtcctgggtttgtttttgaatatgctcactttttgtagcagtttcttttaacctattttcgagtcggatgcgctcattcaaccatttcgttttttgtttagatagatcatttaaatgatcattcgcatcattcagatttttgaagtactgctcaactttggatcgattaaatattttatgaaaccacaaagggcttggtttttgtgaagtgactacatcataatttcttttagcttgagcttgtggatcgattaggttttctatctcaatagaagcattcgatatattatcttgaagatttaaactttcttgtctcagtctttcaaattcacgcgtcgcttctgcttcttgtgtgattaaacttattcgtttctttttttcttcttgttcaaaagcaatattttgcttggtatacttagtttttaatttttgaagtgaatgtattttctcgctataatcctgcattttttctctttcaattttcaattccttatagagacgggagaattcttgatatacaccttcacctgtactggattgataattatcttctagatctttctcaattgcttctatgcttaaaagtaacttgttcacatttgttgacgcgccaccctctaacgagaatacaccccaattctcctcgtctaaagtttcccttttaatctcacgattttttccgaaaccttcaccggttagtttagaattagatatatctttgaaataatctgcttcatccaattgcttttgaaaatcgtcagcaatcgtttctttctttggtaactccttaacaatgttttggactgccccattgtttgaacttgcaacaacaatatttttatctgaaatggaggatggtaaaataccaattttagcactttgccaataaactaaacttctttttatcgctttatcagaaagttgcaccatttccactgcctgttgaaccaccaaatcagcgaaaatatcttttaacagagttgttttccctgttcctggaggaccattgacactacgaatctcatttttatcgtgtaatgctagattcaccgcaacctgttgcatgaatgagagtgcaaaagcagggttacttggaaaacgtcctaacgggtaatatttaggttgtaaactgtttgtctcaaaaatttgtgagttaaaatgaattgactttttatttccatctaaattctgcctgaatcccgaaaagccattaaaataacgatctaaatttttagtagtgattacctttgctttattcagatcttcaataaaaaacgaatgtaaatttacttctccattatctaagtttttcacaaatgcatagcgaaaattattagtggaaacattatacttttgcaaaagttcagaaatggcactgttaaatccatcttcaaatttactgttcaaatcttctctaaatgagttttcaaatttcgaaaaatcttctggtaaatcaccatattggcggatataaccgctcatggtaaagaataatttgtctgctataaattctaattggttatcaaaatatatagcgaaggtgaatttgtcagatttactaacttcttcgtgggttttttcgatcttgtgcttctccctcaataattcaacaacctcttcaaattcgaaaatatcaaaatataatactaaacccgaatttttatagatcttatcttctatattttgttgttctttttgtttaattaaaaagtctctaaaaaacgtattccagtcttcttccatggtatgtaagagctttagcggtttttctttcttaatagatccttcggatagctgctctattgtaatccaagcatttaaaatatctttctttttattcatgttctccccccattatcatctgaagacaaaaagaaaagctcttcaaccttagagagcttcattacactaatgtaccaatcattcatatacgatttgacttcttctaataataccatggactttccgccgtcagtcattttgccctacttgtaatacggttcagagcaattctgtggtaaagcaacgggaatagaagttaaaatcgaagaaaacgtaaaggcatacgatgtcagtcaaatgaaggtcgcatcgagtccatttcaattcacttcatgctcaacgcgtgttctcatggttttgtaagtgctattctaaagccaaggtcatctatcttgaaatcgggcatgcttttccttctactcgtagaaccacagttgttctcaacttcagcccaactgcctccccggaagactctatagtccccatatcgtttagcatcatacaaatcccagcaccactcccaaacgtttccgatcatatcgtaaagcccccatggattaggaagcagttttccgacttgttgaactgatccattagcgttttcttgatgccatgcaatcttatcgatactttcataccgatatcccttggttcccgctttacacgcatactgccattctgcgtctgataataatcgaaagccattcgctttttggttatatatagtgttctgactttcacctgtgattaagtagcattcagtcctgccatgtattctggacaattcgttacaaaagataagcgaatctacccaagaaacttctgtaattggcagactattcgtattcggttctacttcttcttcatgatgcatgacaaaatgatacaactggtgtgttaccggatacttcattacatagaaaggttcaatcgtttcagtccaagtaataacctttctatcactttctcttccagggtttgataatgtataattagaactcagccatttattcgtattaatataatcgcgtaattcaacggtcccaccttctattggtaccatcaaattcattaaatcatttataaatcgttttctgttatttccgtacttttcgattgtcatatgaagccccctgttcactgtatcggttgatatgtgaactcgaatgattctttatggaaataaatacacaatccaataacaacgattcacaagcagacctgtcataacatcatgttagtaggtctgcttgtcttgtttagagcgtttaggaaggcaaggagacataagtttgattgacataaaaagaggagcaattttaaaaaatatactaaattgtaccctatctattcgatcctatttctcaaactatttatgacctttgcgaaccttaagctgcatctttttgatcgttatgttttgcatgagctccagtacgagagggcctttgccgttcaggatctctacatccgttacattgtcctgaatggtaatgatcccgatatcgtctgctgtaaccccttcaagcttggcgatggtacctacaaagtcaacggcacgaagtttcttcttcttgcctccgttgaagttcagcttcatgatctgttggttcagctgttcacgcttgtcctttttgcgttcaggtacaatcttcaatcgcttctcaaaatcttctctgcggcgatctacagcttcttcggaaggagccttcacgacagggatttcgaatccaatataggattcaatctccgccagacgtctgccatctttcggtgtaatcaacgtaatggctttacctgttttgcctgcgcgccccgtacggcctgtacggtgaacatatccctctttttccaaaggaatatcgtagttgatgacatgggtaatattcgtgatatcgataccacgtgcggctacatccgtcgcgatcagataacggaattgtccacgtctgaatgcgttcatcacttcgatccgctcatcctgctccataccaccatggatacgatctgctgggtagtcaaggtcagccatgacacggaacagtttatccacattctcctgcgtacggcagaacacaatgcagctatccggattttccacaatgaacaagtcttgaagcagtgcggttttgttcacctctggtatgttaatcacagcatgttcaatcgtggctgttgtcagtccacttgccttgatctcaatctccaccggtttgttcatgtatttgcgtgacagcttagctacatcttcagggaacgtagcggagaacaacatcgttactcgctcctgcggcagtttctgaatgatagactgtactgtctcaataaagcccatattcagcatctcatccgcctcgtcaataacgagataggcgatccgttcgagtggcagcgtgccacgttcgatatgatccagtacccgacctggtgtaccaacagccacgtgggttctttgttttaactctgctttttggatatgaaaaggggactgtccgtatagtgcggttgctttaatacgcttaaagcgcccgatattcgtaatatcttcgttaacctgcaaagccagttcccgggttggggtaagaatcaaagcctgtggcttattctcattccaatccaccagctcgcagagcggaatgccgtaggcggctgttttaccactgcctgtctgtgatttgaccacaagatcctgattctccagtgctactggaataactttggtctgtacttcggttggtgtctcatagcccagactgtccagtgcttttacgatctcttcaccaagtccataatctttaaattgttgctcgctcatcgtttacctcttttgcgttagttttgaatactctacatacaagcattgcaccgtacatttatcgtatacctcttcattatactctatatgcaggcaggctaacggagtaaatgcttcaagtgtgtaaattgttttcatgattgatgtgtagtttgcactaattacgggaggggtgcggatatggagggttatacaaagaaatttattataggtataaataaccactaaaatattccgatatatgttaatataacacttgggtcaaattacctaagcattagggggagaaatatgaaaaagttttttaagatcggatgtttgggttttattggattaattgttttgggtgttattggaagtatgctttcttccaatgataaaacagctgatactgcagccagtaaaccggcttccacagcacagaaagaaacaaaagaggaggttaagcttgctggaattggtgatgaattaaaagtaggagatgtagtttttaaagttaacaaggtatcgacaaagaatgaaataaaagaaggacaaatcttatcttataagccaagttctgatggaagtgtttttttagttgtgaatgcgacattaaagaacgaaggaaaacaaatgattactacggattcttcgtttttccaattgaaaaaaggcgaagttacatatgcaccgactacaatgatttctgtttccaacaaaatttttatgtatgatggcatcaatccaggattatcacaaacaggaaatgttgtttttgaaattcccgaagatttaaatgattttgagcttagtgtacagactggattttggggtacagaacaaggtcaaattaaaattaattattaatgtagttttataagattacaaggttgtaatacagaggggctgtctcaaaagcccttgaaaaaagtataggcaaaaagaaataccacgcaaacgttcaaaaaaggacaaagcagaggtttattctgctttgtcctttttgcgtttttctgtcaatgtggcttttttgagtagattgtgggcaagacaaagccacccaacctccaggctcactttttgcaagccgcgaagcaggaatcttcggaatccccggttatttttaatttgtccaaacactctcaggctccgtcatgcgccgaactgaaagggtatatccttcctcactacgtaaccgttcccgcatctcgtttttttgacgcatataggtaagactgacggtaatctcccgattgcctttcgctgttgtgcatttggttttcaggggacattcgctacagtctgcacttcgataatggcgggttcgaatcgcgtagccactctccgtgaccgcctgactttcataccggaatggtaacgtttgccctgccgcacaggtccatgtatcttcggtttcgttgtagctccagtggtccactttgcccacggcttgcttccatgccctcgttttctctttatggtatgttccgtatttgacgatgccgtggatgtttttttcttccaaatagctgtaattttcttcgcttccatacccggcatcggcaatgacggtttttactcttttaccaagctgctcttccagatgatccaggtgcggtttcagacatttggtgtccgtgggccgctggtgtacactgtagcccaatacaaactggttttccgttccgatttgtacattgtatccaggctttagttgaccatttcgcatgtggtcttctttcattcgcatgaacgtcgcatctggatcggttttgctgtaactgccccgctcaccagcagtttggatctgatgctcatacttttgcaaccggggcaggaagtctttgcacaactgtcgcaccgctttttttaatgttttgctcttcggtttttcgcttagcttttcctccaattgcttgacggcttgttccagtttttccgcagtgagagccgagacttcgccaagttcaggcaggtcggttccggtgtggagggtatcttcttcgttttccgcttcttcgatggcttgaaacaaggtatgtactttttcttgcagcttggcctggtgcttgacgacggcttttttccacacaaaggtgtagcgattcgcattcgcttcaagcttggttccgtccaaaaaatagtgatccaaggacacgtattgctcctgaaccaacagctctagcacatgggtaaacacagtttccaagacctctttcatccgctcggaacgaaagcgattaatggtccggaaatccggttgttgccgcccggctatccacatgaacatgatattttcgcgaaccgccttggcaattttccgggaagaatagatgcgctgggtgtaggcgtagatgatgattttggtgagcattttgggatgatagctatggcgacccccgccaggatacgccgagttaaaaatggaatcgctgaggcgattgattgcgttattcacaacacgaacgaggtgatttttggggatatctgtctccaaatccattggcaagaaaagttgatccatggtatattaatgtacaaagaaaccgtctcctttcaaatggtgggtcgcacttccattttaccaaggaacggtttctttttgttttacaattttgaaaacagagctgtctctagccattttatgacttatgggacagccccttttttagcaactatacagatacatcgtgttcaattaattagaaaaaatactcacgtattttccgtatacaaatgctacacgtccatccagcttcacttttacccagccgtacttgtctgtactgatcacctcaagcagggtgccctttggtaccgcagcaacgaccttcgctttggatgaagcgctagcgcgtacgttcaggtaagccgcagtaaccttggcttgtttgcctttgatgacagttcccggtttaccagtgcttggtgtggatggtttaccaggtttcgacgtgcctggagttggtgttggttttggtactgttggcgttgtcggcttctcaggtgtaggagtagttgctccctcgccattgcctgccgctttgcgagctttgttcagctgttgatagaacgctcccttggttttcacgcctgcgaattgtgctgcactcacacctgctttggcagatagtgtatcaatctcttcttgagtcaccgcatccaaaatgttaatggaggcaatgttggtgtacttgccatcttccgttgttggcacagacatgatgccattgttaactaactccaccacatctgcacgctctggtgcagtcaggtctacgccagtgattttccagttgtgttgaatcttcggttcgtagacacccttcatgacatctttcagataagcgatggacaggttgcgaattgtaccttggatctcaccaaatgccgaagcatccttggaggaccagagctgcttgaacttacgtccttccatggcgccacctttggcaattagggcttccatccggtaggcattcataccaagtttcaacgtatcgtcttctttgactgccgtgccgttgctgtacttgagattcgtaattcgactgccatatggtttggtcaggtcaatctcatacgttacgccgccgaagaaatcatcggtgctgtatttggaagcacgacgtttcggatcaaagctgacggtcacatcacccgggcgtgttgagttgaagtaccccgcagaccactccatataatccatcagatcgcgtccggtcacttcatacacggttacttcaccgaaggtgtattggtagttgaatgcaatatcctttttcttgatcgggcctacatcgagcttggccttgtcgttatcaatctggtgcgcgaccacatcggcatcactgtaatgcaacatcacttcggtgaaaaaatcagacaaaggtgtttcctggatctgcaccgcagggatacccttaatctcatcagcagggaccaggttcgttcctttcagttcagccacttcgatgttggcatcggcacgagcgaactcgtggaacgggtgcaaagtctcttccagcgcaggatcggagacttcatatgttccgtcggctgcttttacagcgagagcttgagcttccttgcttttcagcacaactttgtcgccgtctttttcaaatgtaaggtcaattcgagagatgtgtgagccatatttattcggttcggagatcaatacgccgttaaccgtttgggattcaatcaaggtatgcatgtgtccggcaaaaatggcagccagctccgggttggcgttagcgatatccgtcactccggtacccggatttccgttctcgttatccaatcccatatgcatgagtccaaccatgacatcaactttgcctttcagctcagcaatggcctttttggtctcttccacaggatctttgacgatgatgccgtccaggtgatctgtacctttctcgaactcggtaatcataggtgtgttcattccgataacacccactttgattccgtctttctcgataattgtataggcaggcatgtagcggtcgccgttttctttgaaaatgttacccacgagaggctgtccattgaattgggaagagatcttctccagtacgtccagtccaaagttaaactcatggttacccataacccatgcgtcatatttcatttcgttcattgcaaccatcatgggagattgaggttgatcattaaacaactcagccgagttatcctgaatcatgtctcctgcatccagcaggatcgtgttgggattctccgcacggacttttttcacaatggtgtagagctgtgtcatgctcccggttgggtttggaccgtccagagcatagtcccacggcatgaatcgaccatgtatatccgatgtacccagcaacgtgatcttggtttccttgtctgcctcagcagcctgaaccggagtggaggcaaaaggggcgaacaaaatggaggcacataagaggaaagataaaggccatccggcgaaacgttttgttgaaattttgcgcatgttgtaatctcccttgttatctagtgtgtgtaaagatatgtatcatttcatactagataaacatgtggtgaatgtaaactccaatgtaagagttatattggatttaagtgagtgaatctataaataacttcagaaaaagcatttaaatctatttttttacaataaaatactataatttgacaggtgttaaaaaccaaaattatccagtaaaatgatgtttgtaagcgctttacaaaaaagaatactaaggaggaaaatcattgattaagtctaagtggttcaaaacagtcggctcactggcattggtagggattctcgctgcttctgttgcggttggtagtgtgagtgctggtctggcgaaaggcagcaaatttctgggcaatattattgccaaccaggttccttcgaattttagcccgtattggaatcaagtaactccggagaactcaaccaagtgggatgctattgaaggcacacgcaacgtaatgaattggggccaggcggatatggcctacaactatgctaacaacaacgggttcccgttcaagttccataccctcgtatggggaaatcaacagccaaattggattaacagtctctcagccgcagatcagaaagctgaagtgacacaatggattaaagccgcaggacagcggtattcgaagtctgccttcgttgatgttgtaaacgaacctctgcatgcgaaaccatcctatcgcaatgccattggtggagatggggcaacgggttgggactgggtcatctggtcattccaacaggcgagacaagctttcccgaacgcgaaattgctgatcaatgaatatggtattatcggagatccggctaaagcagatcaatatattcagatcattaaccttttgaaaaacagaggtctagttgatggtattggtattcaagcgcatcacttcaatatggacaacgtctctgtgaacacgatgaacacggtactgaacaagctcgcggctacggggctaccaatctatgtatccgagctggatatgacgggcgatgataatacacaattgcagcgttaccaacaaaaattccctgtgctttggaagcattctgccgttaaaggcgtgacgctgtggggctacaatcaggggcaaacgtgggtaaatggttcacatctagttaatagcaacggtacagaacgtccagctatgcaatggctgagaaattacctggcgaacaatccttaagcgtgcgtttgcacgaatctgagcttcctttgtaaatccggtaatcatataacaccaaatagcgcctgttctacatgttaagcatgggaatatggcgctatttgtgttagtgctttctctcaacagtgctcggcaatttatggtgcagggaaacatttaattttaatccaaaccaatacaaaagcgatcagcgcaaatatcattccgctccagatcagttgatgtattcccaggtttgcgatgaaccatccgccgatagcagtacccagggtaataccgaggttggaaaaggatacatacaagctgttgccgaattcaggcgcgtcctgcgcttcagcggttaaccaggtttggcttacaattaatcctcctgaatgcacggatgcccagaggatgactacaataaccatccacatgaagtggggaccggcccaatagacgagtgcgtaagctgctacatacagcagggggaacatgaggacagtgcggaccacgctcttacgcagaaactgtccaaaccccaaatttccgatgatcatgacgacaccaaagacggtaagcataacactgatccatgatccgctcatgtgagtgacctgtccaagatactcggcgaaatagctgtatacggagaacatggcggcgaatataaaaatgactgcggcaacattcagccataatccaggtttgcgcagaataccgagctgcttgccataggacatcttttccttcacgggcatcgagggtagccagatccatatgccgattaaagcgaccacactgaccatcgctccaaacaggaaggcgatttcgagggatatgcgttcagcaagatacgatgtgagtggcacgccaaaggcaaagcccgcggtaactccggtgaatactttggcgacggcctgactgcttttctctgccggaacaagttgggcactggtgaccagggctacggaaaagaagacgggatggaataacgcgggaatgatacggaagataagcatggtatcaaatgttgtggcgtaggcatatacaacgttcgaaatggcaaacatcagcacagcggctaaaaggataattttgcgattcatcccggatgccagcaaggtgagaaaagggcccgcaatggctacgactagcgcaaatatactgaccagccaacctgcctgtgcagccgtaatgttgaatttattcgcaacctgaggcagtacccccacaattcccatttctgttgtaataatcccgaataccccgagtgccagcatcaggataaggagtggattgacctgttgtgatttcatgtaaagcgtacctccattaaatttaaatatacagaaaagtagatatgatatgctgaaatgagcctgccttgcctcctataatatgatggacatgagagtaagttctctggactacattatatctagatttatagatttgtaaatataaaaggtgaaacgtcatttctttaagttgtcttcggtttgtgttctacagtagcaataatggtgacattaggcattgaatggcccatgaaaaatagcgccggcccggggaatccttggggcctgacgctattgatgttcgcgtttttaacgatgtgttggattagttatttcggatgaataaccatgctgttgaatgaatcggcttccagctccatgtgtagggtctgtccttcttcaagggttagatacaggtcacgacggtcctggaatggattgttgatgacaataacgagactgttatccgggttgcgaaaggcaacggatttcccgctccacgcgcctgacagaccgactcttcgagcaccaggaacaatatgatgcgcgaagtgtttcatcacataatactccgggttacgagtaacctccttattgtccggatctatcgtaatcatggagttctgctcccagccccatgtgctacggcctttgggttccagaaccatgttccagtagatgtacgcgttcactccgttgctgaagtagtgctgatagagattatatacatacttggcatagttccatgagttgttgccatcaccgcattcgttctcggtttgcatataacgcagctccggataactcgccgaggtacgttgaatcgcatttttgcctgcccactgatatccaacacctttgatataggaataggcctttggatcactcaggacaagcccggcgtactcatcgaagtcgtttgtttttttcttgattaattcctcccatggatcaggggcgttgatcgttcccagccagatctccgtatccagaccgtgttggtcaaaagccgggcccagataatcggcaataaactctcgaagctgctcgcctgtccacatgcaagaaggaaatttctgatctgcaatcacttcgttctgcacatgcacctgatggatcgtaatgcctgcgtcacggtaagcctgtacaaactttacgaaatacagggcgtaggcctccagaatatctttctcccagcgcagtgtcccatagttataggctttgggcgacttcatccacgttggcggactccatggcgaggcgaagaattgcaggttcgggttataagtcagagcttccttgatgtagggaatcagatatttgaaatcacgtttgatcgaaaaatgttccatggccacgtcgccgtctacctcgttgtggctataccactgctctgcataatcacttgcgccgatcggcaggcgacagatgttaaacttgtgctcgccctccggatggaaaagagagtgaaatacctcatggcgctgctcctcattcaaatgggacagagccatataaccaagctcgttgaaacatccgccaaacccttccacaagttggtgctgttcacccgtgagttttaggttagcgctttcattagttggcacaaaagatagctctctccacgggctgtcttgggttgtggaataaccagtgagcgtgaatgtcatgtgaatttcctcctcgcttgaacctcagttgtcatatatattacgttcagtataacaactcctacggcaaaagaagatatgctaaaccgtgtgaaatttaccctaatccaagatagatcatcacgagttcgtatccgcatagacagatggtatagtgtgtttgcttgagatcggcgatgtccatataccattatccaatgtcatatcacaactgtcataacacaacaaaatccccgctgatcgttcagacggggacttgcgctatgtttctcatattctcttatggctgcaaatgaacgtgagacacaacttaaggctgtacactctcaccaagctgtttattttcaaaaatcagaatcgttttgctgcttccgatgtaaccaacagaggtattgaattgctccgagatgaagcgaaccggtacaaaagctttaccatctttcatcagaagaggagcatcattgatcgcaagtgtatcattcacgacaacttgtttgttacccacgctccagcggatggtcttgtcattctgtgtgatcacagcttcgcgggtaccgctgttccagttcacacgggcgtttaactgctccgagacaaaacgcagaggcacataggtccggccttcatcgataaaaggtgcagcatccagtgtgtaagcacgatccccaacataggcggtggtagacccttcaatcagacgctgaaagctgccctggggcgttcgtttctgctcccgcacattcatccggttcagaagctgcatcgtatgactgccactcacaacatccagatagttgttctgcaccgtgagtccggcaggctcaacctctgagacagaagtctgaataccggaggataacgaggtagacgccgagatatcctgtatagcatttgtcgctgactgatcacgggtaaacgtaaaacctgcgatcggtgtcagatcccacacccggttgttggataattttaatacgtccaggctggaaagctgccgtaaaggttccagatcatagatctgattggactctgcattcagttccgtcagcccagtcagtccctcaagccccttgagatgctgtacttggttaccagagatatcaagtgtccgaaggcgtgtcatgtgctccagtggtgtcagatccgtgatttggttgcctgccacattcagattccgcagtgtatttggcagttcagccagtacgtccagcgtctgaatctgattgtttgctacgttgagttgttggagccgggttttacccatgagcggtgtcagatcgctaatggtattgttcgaaatctcaagccacttcagtgcatccgcatccgagagggccgcaagattgtcaatctggttaccgctggcgtggaacgtatgtaatcggttgaacccacgtacaacctctatggaagaaatggaattgttgctgatatacagccgtcccaagtcttttaattcagtaagtgcgtctatggatgtaatgtaattattgcgaacatcgatctcgcgaagctgggttaggtgcgccagcggtgtgagatcctcaatctcattcccatataatcggaggtgagtcagattggttgcatattcgagaccggacaggctgtgaatacctgcattgctcagatctaccacctcaagctgctccagatccgttgaagttaatggcatatccagaggtttgttcaggattaacttcagtccgtcctccaaagcgggatcttcaatgattccctcgcccaagtccgtagttgtgtaagccatggcttgccccgatgccccgagactcaggatgaatactagaaataatagcgtcattcttctcattgcatgcattccctccgatttttagaattataaaataatccgaacagattgagttagttaagtatagtatctacacgataacagcgaccggaaggttgttctgcccacggagtgttcagtgtgaattgaagagtttaacatatacaggttcggctcaaagcacatctatagttattaacccgtcaacgggaaaaaggaacaaggaatttcgtaatgggtatttctctacttctattctatatgaaacaaaccctgctctgcactcttcagagacatgtttatcaaaaaaaatagaacatctcccgcagaccctattcaacccacccttgaaacgggtaaagatgaagtaaagatgccattttggaggggaagatgtgagtatgcgccaagccatgatcattagtaatccatcgtcaggtaaggaagaggccgagcagtatgtgtcccaagtcagagaaattctggagtcacagcagtatgaggtagttgttaatgagacggccggggaaggtgatgccaccaactactgtctgagcgcctgcaaagacggctgtgatctggtcatctccatcggaggcgacggtacactgcatgagacgattaacggcatgatggatcaggatcatcgtccccgattaggcgttataccgctaggtacggtgaatgattttgcgcgtgcgctgaatatctcgcttgacccggaagaagccataaggcagttacgctcgaatcagacccatatcgtggatctgggggaaatcaatgatcgcctgtttgccaacgttgtggctgcgggttctttggcagaagctctgttctccgtatcctcggaagagaagtcgaagttgggatcattcgcatatctcaaagaaggcttgaaagacctggtgaatacaccagccaatcatctaaccattgaatatgacggacagctctgggagggggaatcgccactttttctggcggcgctgaccaattcggtcggaggattcgagaagttatccccggatgcagaggtggacgatggtctgatacattgttttgttgttcgtaatataagtgtgttcaacagtctgaccctgggcacctccctgttatttggtagtctgaaagaccataaggacgtggactattttacagccaaagaagttcatgttcgctcagacgaagccattcgcaccaatgtagatggggaagaaggtcctgccctgccgattcatatccgtgtcctgccaaggcatattgaggttatcataccggaagaagtataacttattcttttggatctataggctggaatgaagaacctatcatttctccatatgaaagtaggataaagctattgaaaccgattgcagatatatgtcacaatcaaaggtatgatacacgataatattcgaatatggagggaaaacatcttgagaacgattaaattgggcagcagtgcactagaagtacctgtagtcgcggtgggctgcatgcggattaattcactagacggtaaggaagccgaacattttgttcgttctgcaatggaggttggcgcaaatttctttgaccatgccgacatttatggtacaggaacatgtgaggagatcttcgccgaagcagtacagatgaatccccaagttcgtgaaaatatgattcttcaatccaaatgcggtatccgcaaaggcatgtttgatttctccaaagagcacatcctgaattcagtcgatggcatcctgcaacgtttgaaaacggaatatcttgacgttctgctgttgcaccgtcctgatgcattggttgagccggaggaagtggctgaagcctttgatcaactggaacgcgaaggtaaagtgcgtcacttcggggtatccaaccagaatccgaaccagatcgaattgttgaaaaaatacgtgaaacagccactggtagccaaccagttgcagatgagtattaccaatacgacgatgattgacagtggcatcaacgtgaacatggagaacgatgccgcggttaaccgtgacggtagcattcttgattactgtcgtctgcatgatatcaccattcagccgtggtccccgttccagtacggattcttcgaaggtgtattcctgggtagcgacaagttcccggaattgaatgcaaagattgacgagattgctgcgaagtatgacgtgagcaatacaacgattgcaatcgcatggttgcttcgtcaccctgcgcagatgcaacctgtgacaggcacgatgaatattgaacgtctgcaagactgtgtaaaagcaggagatgttcatcttacgcgtccagagtggtatgaaatttaccgtgcggcaggtaatatactgccttaaattcaagttatagtgagcattctgactgctgagtcagttgagaacacgagcccgtagatggctcgtgttttttgtctattttcaggtttgatgccagacgtgtttccgatataaaataaggataggattgtccgttttaaaaaaaaggattaaaatggttttaatacaaattagttgaaaatattatattgaccgatactttctaattacatataattacttttgcataccgataatcccgtttatgttttttattttggagggtggtgttcgtttggagtcgacaaccacgatacgcgatcacttggaaagttatctgaagcgtgaacagatgtccattagtcatttttcggaaacgtcagggattaattcgggtacgctcagcaatattttgaataaaaatcggcctattgccatgcagcagttggatcgcattacttccgccatgagactggaagaaggttacttctatgagttatacatagacgagtgttttgtacacgcgaccccggactggcgaagactgggacccttccttcatcgctgtgccgagttggacaagttggactgtattgaagaggttattcgtctgatgatggataatctatcctatattcctttgttatttgatgtggctgaagagttctaccaagcgggtaaattcaaaccggccattcttctatatgaaaacattgctgaaagcgagaaaatgcaacattccgagcggcttgcactctgtcagtatcgactcttccggttgggactgactaatgatcagcagcggaatctgattatcgcagcccggtttgaatattatgtggatcggctggatgagcgctatcaattggatgcgcttaacgaactaattaatgcatttgcatcacttcacagatggagcaaagttcaggaactatctgaaaagctgcaggtgaaagcagccatccattatgagatgaatggccgaaggaaacaagaagagaccaaacgacctatcgttttttatattatgtatgcgtatttagcctgtggaagtgcccacttccacttgaacaactatgaaatggcattgaagtatgttgcattatactccgattacagttgggtgaaagagcctgaacctgaagaaaaagtggttattcatcagtttcaggaatgggctgagggtaatcgttatatatatcaattaatggctgggcagtttgaagtattacctgactacctcgcgtatatctcaacgaaggaaaatgagatatttccagcgctttgtgatattgtaacggctgctaaccgttatgatatgaacatagatcatgtactcaatcaatatgagccatacttcacttatcatgaacagagaaatcggattgggaaagtaagcaagcaggtaaccgatgatcgctacgttcgtcttttagctggattaggcacgtattgtcttaaaaaagacaggtttgtggaggggttagattttgtactgaacagcttgagattttctattgaaattagcgatggacgaggtatgcttagaggtgtcggactgtttgagcaatacagggaatatgcgtctgacacagctatacagcagtacaaaatcttgattggtgaggtgcagaaactcaatgaagagaaagctggctttgctgatagttacatgtagtatagtggtgagcattgtagctcctgttactggacctgtcccgactgtggagaatccagacccttcaatttaccgaacaaatgatcacggtttagggacataagcctgaaccaatggacgcttctgaattcatttcagaagcgttctttttttgtgtatcaaagtggaagaataagtatgtcgtatctcacatgcgcttatgattggcataatacactaaaatatgacaaaaaggaggggtactatggatcgcctggatttgatatcacggatcgaagatgccagacagttgttatatcgcatgcatatggaatacggcagtctgcttcatccggaagtgatccagcaatccgtagtcctagacgggcttattaatcaatacaacagagccaaggtaggaaaggcaatgaattaagttcgcctatttacatttgcgtctttgtatactatagttagttacatgagtaactaaccgactaactgactaatgaatacgtatgaaagttggaagcacatgaaatcgactttggatgaatctcagcctatttttcatcagattgccacaatgattatggacgatattgtggaaggcagattgaaggtggaagaacaggttccctcaaccaatgaactgtcacgcttctacaatattaatccggctacagcccgcaaaggactgcaggagctcgtagacaaggggattatatacaaacaacgaggtgttggaatgtttgttgcaaagggagcaagagaagcattgctcgttgaacggaagcaagatttttatgaagaatacatcaagcctttacttgaagaagccagacggattcacatgaatgaagacatgatcattgatctgattcgtggcaagaaggataaggagagtgagttatgattcatatggagcaggtcaactacagctaccagaagacgcccgttctgaaccaggttacgctacatgagagtgagccaatcattagtgcaatctggggaagaaatggagcgggtaaaacaaccatgatgagtttacttgcagggcataaccgcccggacagtggaaccgttcagatcatgggtcaagacccctataataatctggctgctcaagagcatctgtgctacatccaggagaatcatcccctggggaaaaactggacggttagtgacatggttcaaatgggccaatattttcatccgcagtggaatcaggatttggcgggacgtttaatcgatgtgttcgaactaccggcgaagaagaaaatcattaaattttcgaaaggcatgaagactgctgcccagattatattgggtcttgccagtaatgcaaagataaccattctggatgaacctaccaatgggctcgatgctgagaagcgtaaattcttctacaatgcgctactggaaagttatgaagataacccgcgtctgattctcatatccagccatcatattgaggagattcagcctttgtgtgagtcccttatcgttttgcaagccggagaggtgttgttaaatcaatcgatggaagagatgcgtgaaaaaggggttcttctaacagggggaattgacgacatcaaccgagtcacagcaggtgttaaagttatagagtcttcccagatgggatcgactgtgaaagtgatgattgatgagccctactcgaaaatgtggaaggatatcgctcattcacaggggctttccattgagaaagcgacattacaagattatttggttaacaggacccgtaatcaagagggggttaaaccatgaacgcagtaaaaggtacgaatcgactgattcgcgatgatatgcgtttgtatctgggcatattttcatccatcgctctgatgctcgccgttgtatatctggccattggcttcatatttgatgtctcgtatgctacgcaactgtttggtcccatgtacggagggatatgtacgtttgcaatcgggggaatgattacactgtttccggttgcgattggtatgggcagtacacgaattcaattcatgaaatccttctatatgaactcggtatggatggttgcaggcaccatggtcattctgcatgtggcgtatttcctcatacacctgcttcaggaaaaaggaattgttggcgtaaccctttatcaaccgggcatgttgtattcaaacaaatatcattttttatcctacctgtggatcgatctgatgtgtggctttctcgtactgggaatctctgtcttcccaacggtttgttggatgcgcttggggatgcgtaacttcttcattatgttcttcggggttggcttggtctttacgctgataattacattgggcgatcttggtgagtttatgttgtggattgctaggatcaatcgcatgacattgttcaccgttctgggatgtattggtggtgcgctacttctatctacgtaccccatgatgaagaatgcgccgcttaccatgaaatccaaaaaagactgacaggaaacagttataaaggaactgggcaaggaatctaagtgaaatcattccgaaatcagaaaacacgagtgcgaacacgcctcgtgttttttgtatcatcctaaatcattggatttacctattcaacaatctttatacgcaattcctaatgaaggtgcatcccttaagcctgagcctgcggtttgaatccttcgtctttgagatactcgccagcttcgctacgcgtttcaaaagccatatccaggttatcaccggaatacacataccacatgtcatcttcgtattttaaagtcagcatatgtccctcttcatcgatccacgttccgccaccggtagaggttgtagacaatgcaggagcagcagcttttacttgttctggctcttggaattcaactgcgttgggattgtgagacatcgcttggatcgtttcatctaacaaggtgcgcagatctgcttcggagtaatcacgaatattgacgaatcctttagcatcggtctcatagttaggcagtagtcctgcatagatataaccgtttccgttagggtgaatatggagagcaataatttttttatcatacgcactatcctcgtagtggaaattaactcgaccgagagaaacatctttgcgttgcagttggggatacgattgtagcacttctagcttttgttccacgttaagcataattgcctcctgtaaatgttcaatagaggtgattataacatgccctcctgtgaatttcccgataaaatgtttctccccagttcttttaggtgttccataacttgcagatagggatatggcccgtaacttacacgtgctacacccagtgtggcaagctgttttggtgaaggctcaggagacgtaaccataacgttaataggcagcggtgaacgctcacacaattcctgaatcagttggtgatcctgcaaaccgggtacaaacagaccactggctcctgcatctgcataatggatcgaacgtataagtgcttcctccaggagagagtggttatggtgttcaggtgcatgttgcagaaaaatatctgtgcgggcgttaatgaacaacggtatgcctgcttgctccgcagcttcccgggcggcggacaatcttgggcattgctcctccacagtgtacaatcccaagccagcgggaagttgatcttcaatgttgatacctacagcaccatgatcgatgacttgcaggatattttgcttcacttctgacacagacctcccataccctccctctatatcgatcgttacaggcagatccacgctcgctgtaatccgtgcgagattggcaagcaccagatggaatggcatggcttcaccatcgcgttcaccgtgggccgcagcaacggaccagcttccggtagcaatggccgttgctccagcggattggatggcttgtgcacttccggcatcccatacattgaccagaacaagtggttttcctttcacatggtattgttggaacaacgctgctttttcttctaaggtactcatattatgttgactctcctttgttatatcatgcatttctttggacatttgatgcgtacttcattacttcattctgtttttcagctaccctgtttttgtttctcgtgagtcaaaagccagtttttgcgagttaatcccccgccgtatccgcccagctcaccactggcattgattacacggtgacatggaatcacaatcgcaagctgattggctccattcgcctgtgcgacagctcggcaagcagtcggttttcccagtgcatttgcaatctcttgatatgacctcgtttcaccagccggaatggccagcaactcgtcccacacacgcttttggaatagtgttcctaaacagaacaacggtgtgttgaatgctgtccgaataccttgaaagtactcgtttagttcacgctcaatggactggatgggagctgtagtgccgggtacaatcgctgatttggttcgtttgcgcagacgctcaacttcgcgttccagacctctgcggtccacaaattccagtaaatatagcgactcctcatctgcaatggccatcatcgggccgaggcgggtgtcaatccaggacgctttcaggatatgtccttcatcgacttgtgtaggggcagcacccatgatccgtgaaaaggcatcgcggaagccgctgcttgattcatatccggtagataattggctatcaatcacggtgcggccggagcgaatgtttttcagggcaagtcccatgcgacgagcgcgagcatattcaacaaaggtcatgccgaaccgcttcttgaactgacggcgcgccgtggattcgtcgatggagagggccttgaaatcctgttctttccagcgtttctccggatttttctccacagcttccactaatatgcgaacgacatcggatacttggttggggtgagagagcgggcgacagcgctggcaagggcgataagaggccagaagtgcctgctgagccgtctcatagaattcgcagttttcaaattttggctttcgcgcaggacatgtgggacgacagaacacacccgtggttcggactccaacatagaataaaccctcgtattccgaatccttggccacaagcgcctcgtaatattgttccttcagatcagcagaaatcatgggggcacgtccttactcattagaatctttgtctatacctattatagaaaaacgttgcagcaagcatcgccgaaaatcaggcatgaatattggatagattaaatcggatataacattgaaattcggttgttcagaatttgtttagagtgaactggtagtatagacctatcagggtagggttacttaggcaaagatacctatatagtgaaaaagtgagttattgatcattcattgttataggaaaaatacataggtaaacatgaaattaaagattagcggaatgaaagtctggaggtcgactagaatgagatattctacgtacaaaagtatttatgaatccgtatataccaaaacgtccgagtctcgcaccatgtatgttaaagatcaattcatgcagcgtgtgaagacgccaacctggctaatgaagatcgtcactataactctaattataatcatagggtgtagtgctgtattcactgcatttgccggagatgagcaattgttgtcgggggaccagatcgttgtatctcagggagatacactgtggggcatttcattggtacataaacctcaacagatggacactcgtgtgtatgtagaagcaatcaagaaagtgaacaaaatcgagcataacgccatccagattggacaagtgttggtcttacctgggttcgatcgataaaataaacggtgcatgatgtcatgaacagagttctttttttattcatcgaggtgcagttacatactgaattttattaatcatttacatataatggagcttcatgtgggacgatatggtgtagtgattagtaagtggtgtgttggatatacgtgctgaagatggatgaagggagaagtagatgatgaaaataaatataaagaaatctgcactttgcatgtctgtgctctgtatttcgctattcgtcagtgcctgtggcactagcggtgaatcggttcaggaacatgcctatccggaatcgaagcaacctgtagaggaagctggagaaaactctgttccgaatgcggatgcgaagaataacaacagccaaggcagtgccagtggtgatgagggcaaacctacggcccaatcggaatccactgaaccgtctgagaagattgatatcgtcattgaccagtcggagaaaccgagcgagggtaacagctttgattttggaattaaacaagttccgaaggggtatacactaacggagatgcgatggacgtctaacacggtgacgattgtgaattcactacaggaagccattgaacatggtggaaatggagaagatggcttttactttagcggcaatggacaattctccggctttatctattcggatgagatgaagggcgagcggggcaaagcgacatttgtcttcacaaatgatgagggagaccaaatcatgtccgaaaaagaaattacgttgaagtaacatacgcatcattaacgctccgtctggagcctattgaacaggaaaagcagccacgtgggctgctttttttgacatccatgattacaagatcgcagatctatctgttgctacataaagtcaaaaaaataacggaccacgtggaacataaccggcgaggtataggtcaggctgtcgacccggctcaggtagctttttttcagtgaatcgaacttgttgtcatctccaattaacagatcgcgcttcagtacagacaccgtcagactaccgaagaatccagccaaactgatcaacaccccgatgaacagcgagaatttccaatcaaatggcgtcaggtagggatggatgaaataagacgtagctgtcgttacaataaacgcacacgcgaacccttcccaggtgacaaatggattggcggtaggcaccacttttcgtttgcccagatagagagagaccagatagtgcaccacatcattaagctgtgttaacacgaccaagaacagcaccagctttgagccgtactccggtgaggcaaatgggaaataggccaggtggctcagtccaaacaccatcagcattagtccccattgtgtggagctgacactgcgcaggaaaccgaccgtacctttgttaatcagacgtggcaggggcagcactaggaacacatataggggaataaacacgataaacatgccataccatccaatgtagatccagtagaactgaaccggaatcgccagatacgcccataggaacagcctacggtcggctttgcgtgtgctgcgaatcatggagaagtattctttgagtgagaagaatgcaagcaccatgagggagatgagcgacacgatggggttaaaaagggtggcgaggcagaagatcacaaacataccccaccaggttttgattttttggccgatgcctgaatagtctttgcttggctgaagctttgcaataattttgtacacgatatgtatcacaagtaaagctgtgaagattaacgttagtgtaaagagtgaactgctcacgtaccaatcacctgcttattcaaagtaagattccattgtagggtacctatgttattatgaaggaatagtgccaacttgataaggggaaatttttgctatgacagatgaacgctccatctatatcctgcttacgaatacaggaacgctgtttaccaaggttattcagagctatacccgagcgccatataatcacgcatcgatctcatttgaccgggagttaaccgagctgtacagcttcggccgcaagcatccgagcaatccgctgaatggcgggtttgtgaaggaaaatattcagacaggtacatacagcaagtatcccaataccacatgtgtcatatacaagcttcaggtgacggatcgtgaagtggaaaagatgaaacgtgtgctgcacatcttcatccgaagccgccagaaatatatgtacaatctgctcggcgtgatcggcattacactcaaggaaccggtggagttcagcaactcctacttctgctcccaatttgtagccgagattctacagcgttcgggaatcaaactgtggaacaagctgcctgcgctgttgacaccggatgattttcgccagagtgaacgattgcaattggtctatgaaggaaagctaagcgagtatacgctggggaatacagagcaagagtagggtaggtgtgtgtgctgatgcttgccaaggaaatcgaaccatgaaacagcctgctgccacgaatgacgaggcaacaggctttttgtgtacttcatatggatgatggtgaggatgaggatcggtcaaaatcaacctcttcaaggaattcgatcacttcaccattcggactgtggacgagcgcatttctaacccgaagtgcaggttcgccaagcgatatccaatccggttcaacgtaggccttggctccatgggcgagcgcttgctgatagatgtcttctacatcatgcacgtaaaaggcgaaatgtaacagtgcgccgtgccggaccgcttcaggagagatggcaggtttaccctcggcaggaatgaccgctttcgggtcaaacacctcaatgcaggtgcgttgatccggagagattaacatacatgcctcggtaatgtggaaggaaggcaaactccaggagtgaccgaccttgaagcctaatacttttgtataaaacgccagagtatcttcgtaattacgagcctgaatggctacatgtgcaagtccaataatactcacattacatcgctccttcttcagattgtagtctaaattatagggttgatatcgcattggaaccatacaatatcaaaggatataatgagattaaatctaactatttatagctaatttatcagaaaaaccttattaaataagtcgacgactcggaggtcttacaaatggaacacataatagatgaaatcgatcagcagattatgcgcttgctgcaacatcatgcacgtattcctgttgcacagatcagcaaagaaattaacatgtcccaaccttcggttaaggaaagaattctgaaactggaggagagaggtgtaataacgggatattcaaccatctataatctggcccggttaaaccgtagaaccacgacatttattttgctcaaaacagagcattgcgacgagttggtccagttctgtgaacaggctatcgaagtcacggatgtctatcggattagcggtgagtataactacctgatcaaggtacagacggcgtccattgaagaacttgccgaatttcaggattcactggtgaagctgggaccctccaaatcccatatcagcatgaaaaatattatggaaaaccgtgttctcctttaagatatgagagagactagagagaagacatttgttctggcaccggattcgttcaaagaaagcatgacagcaaaagaagtatgtatcgcgatggaaaaagggttgcgtaaaatatacccgacagcagactatattcatgtacctatggcagatggtggagaaggtacggtgcagtcccttgtggacgcttccggcggcgtccttcaccagcacgaggtgagcggaccattgggtcagacagtcactgcgcagtatggcattctgggtggcggaacaacggcggccatcgagatggcatcggccagcggcatccacttggttaccaagaagacccgggacccactccggacgacaacctatggaacaggtgagttgattcgcgcatgtctggaccttggcatacgcaagatcatcattggcattggtggtagtgcgaccaacgatggtggggctggcatggctgaagcacttggtgtgaagtttctggatgcagagggtcagccgcttgcgcgtgggggcggggctttggatcagctggctcagattgatgtatctggtctggatgagcgtttgcaggaagtggagttcattgtggcctgtgatgtgaccaatcccctatgtggggagcatggcgcatcaagggtgtttggaccacaaaaaggggctactccagagatggttgagcagctggatgcaaatctgtcccattatgcagatgtagtgaaacgacagcttcataaagatatccgagatgtaccaggagccggagcggctggagggttgggcgcgggactcttgatttttacacaggctgtattacgtaaagggattgagattatcattgaatatactgagttgcgtaaaaagttgattgctgcggatgtggtatttacgggtgaaggcggtatcgacttccaaacgaaatttggtaagaccccctatggtgttgctcgggcagccaaggaagcaggtaaacctgtgattgcacttgcaggttgtgtgggcgaagggattgacaccctctacgcggaaggcatcgatgccatatttggtattgtgcctggagcagcagatctggatcgactattgcgagaaggcccggagaatgtggaacgtaccgccgagaatattgcaagagtactgaagttggggttactttcttaggtcagtgaccatctggatcgtatagggtcggattgcggattggaatgtgatgtgacaaagacgggatacgggtatgcctgatatcaggtgatctgtctctcgtcttttttgctgtgaagttccattgtgtagttgtcgttcaagtcgcttcgttcgcgttatttttacccttgatggcacaatgaagaaattgcacatacagttacgtatctgatgaccaatacgttcacgacgggcagcacattgtatgtggatggcgggtacaccttgatttaagagtcggagctatataggtcccgaagaatactttttttaaaataaaatgatgaattttggcgaaaaaagttgagatctatcctgtttttgtactacaggggggatctttttccttttatttgctctttttgtttagattctgtttatcgcagtgcactacaataggccttacgtatcagatggattgaatttatatgtaaaaaacatgagatagggaggatcaagtacatgaattataggagaataattagtttggtgctcattatggtgttaatagctccgtggttggcaccagcagggaaggttagtgcaggtggctcatatcctgtaccaggaaatgatgggaaaatcacagtcaagcttactgatgataataacatagaggtgcgttggagcaatgctgactctgattccactgcaacttatgagctaaaataccaagtcttcgtttccaatacttctaatctgaataacatgacagagatcagggacaatctagagtatggagatgaggattgggtgttgggttcagcatctcaagacggtacgttctccaaaaaaattctaggtttagataccagccagacgctctattataatgtgatggttgtggatcgatatgatttagaagccgcctatcagatgaaatcgttcaacccaagcacacagctgagcccgttggagcaattcaacgatattatacaaacgaaggatcagaattcacagatagatctcaaacctgaactaattgagttacttggcaataaaaatttcatagccgatcctgatttcaaattgttgtctgaggaggatcaggaggacatcatagaatatttattgcgtatagatccaccgactagtgaagggtatgaggataaggagcaagttcaatatatggtgcaattggctctgcaagcacttgaacttcctcgcaaaatcgggggatcagactccagaaaaatactcgatgaattttataataaaaaagctgaaagaaaacaaaatttcaatgatatggaagaaaatagtgattattataaatggattaacttttatttcgattcatccgaggtagaaaagcgtatgaccgcattttattatgagcataaattcagaaaaaatcctgatattttagatatactggattatacggagcaggcttgggatcgtactccttttataaacaaggtagagacgtcagaagacatgttggtaatgatggaaaggatgtcatccattcaagaggggatcgagtcatacaattccgaagatgatgtggaaaatccacttggaagcttccctataaacattagtaaatgggaggatcttacctccgaagagcaagaacaattggcagaccgtatgcttagtgagagaccccttggtggatatgcaagttttgaagaaattcagactgcatttaataaatttttcccggatgataacgaaagcgatccattgagtgtcttaaatactgcaaagagcaacagtaatatagcggctatgcgaatggctatggaagatccggatctgggtattactttacccaatggatacggtgccttgtctttgcaggttagagatttcattgcgggattcctgattgaatatgtaaataaagattacaaaaacaaagaacaggtccaatatatgattgaacttggtgtattgtcacaatctgtttgggagcagagggaactcagtgttcttaggaataaactagatctgctcgctcagcaattagtaaatggacctaatcactttaatgaccaacagacatatgtgttacgtagcattggacaacaacatttggaacgtagcaaagtagataaaggtgtactggcattcaattacttgcatctagttgcattcgaaaggttggaaggagtgtctaaaggtgatattgttgagcctgatattgttctgaatctcctctctatgcctatcgattcatttgagcaagctacctctataccgcgaatggatgaatggcttgataaagcaatgaaagatcagattaaaggtgaagcgttcttcagcaagtacaaatttaatcttagaggcgctcttgatttatccaaaagagcagaacttagtcctgaaggccagaaggaattggctgaatgggtcctaaatgaacaagacagctatgaggatgttgggaatctgcaatatgtatttaaccgattctttacggctcctaatgtgaaggggaatgacatcaataacaccctaacgggcttggacagcacgatggagatttcttttgacaataagctgcactggattgatgttgccttcattcaaaaaatggaccttagcggcaacaaaacggtatgggttcgttacaaagcaatcagcgatgaactgccaggccgcgccgtgaagtttgtctttacacagaatggtgatagcagcacagataatggcaatactccaacgcctaacccgggtggtagcacaggtggaggttcgtccacaactacaccagtaacctctacacctgctccaacaacgaaacaagagcagatcgtggttgacgttaatggaacaaacggcaccaacctgaccaaaacaccaatc

SEQ ID NO: 12 - DNA, 194113 bp, Paenibacillus xylanexedens
  source 1..194113: mol_type = genomic DNA
tattttaatcctaaatacttatataaaccttaacagccctggtaaataatcaaggctgtttactatttcaatatttatgagcatgttaaataactttaaaaggatcatttcttctctatcatcgatttaagtacaacatctgtctatactttcatttggttgcaagcctccccaaggattgtaagggagttctgcaatgcatgctgggtttccgaatcaatgatgacgccttgtttgttcattttcaatgtaatatgaggaatggttaaacagccctcctgtagaacttgtgcattaatcatgtttagtgtgagcaataaggaagcatgggctttgtcacctcccatggggcttggggaagcagcaatgacaatggtgggtttattgagccattctccagaagatacaacccaatctagtgcgttttttaagaccccaggaacgccgtttccatactctggcgtgcagataaggacaccgtccgaatgcttaagttgggctctcaagttctgtacggacactggaccctcctcgacatcgaggtcagggttaaaatgtggcagatcatttaatccatcatatacttcaaacttaaggttagtgtgagccagtttaatcatggcgtgcattagtaacgtattggaggactgattgcgcagacttccggaaatggcaaggatatttaattcttttttcatggatatagatcatctctattctttagtaatgtagggcaatttgtttattttcctcctgtttgaatgagctgtctataaaaaaagcatataattaaggcattcttcatgttagtcagggaatatccacaattcttcatcaaaaatgcatgccatcgtttgtattactctgggtaatagaatgaagagatcactttaaaataaacaactaacgaaagaatcataataaatattttataaaattagtaccaagtactaagacttagtgctataatgataaaaaacaagtgaggtgactaccggtatgaatcatcaatcaaaggcaaccatcacggcaatggggacgtatgtaccggatcgaatattaacgaatgctgatctggagaaattggtcgagacaagtgacgaatggattgtacagcgtactggtatgagagaacggcgaattgcagctgaagatcaatttgtatctgacctggctacgaaggctgtagaagatatgatacgtcgttatgatgtaagtgtagaagatgtggatatgatccttgtggctacaagtacacctgaatatgctttcccaagtaccgcatccagagtacaggctagtcttaagatcccacacacgggtgtactggatttaaatgctgcatgcgcaggttttacctacgggctacaactagctgacagtctggtgaccagtggaatgtaccgcaaagtactggttattggagcagagacgttatccaaaattacggattacacagaccgcacgacttgtgtattgtttggtgatggagcgggggccttcttggtggagagatcatcggttgctgagggtgactttatggcagccatatcaggtacacatggagaaggcggtgtacatctctataagagtggtctgtcttcggagatgaatggtgtgcctttacagggcgaaggttgtttagttcagaatgggcgagagatttataagtgggctgtacggacgattccagagcaattgggtaaacttataacgaaagctgaattaagccctgaccagattgactggtttgtcccgcatagtgccaacatgagaatgattgaagctgtttgcgaacgtggtccggttcctttggaacgtactttaaccagtgtcgagtatcgggggaacacatctgctgcttccattccgcttgctttacagcttgcagtggatgaagggaaattgaaagaaggacagaacgtagctctctttggctttggcggtggtctgacgtacgcaggtctggtgctgaaatggggcgtgccggacaaggttcaggaatgagtaacatccgacggtatgcaacacaaaaataaatagagaacataaaagagaccacccgaacttcatgcagtcatgaagaggatggtctctttagtgggttaactcgtttcaaaaaaatgatatgattgcaattattttttgtgttaaccggaattgcttgatcccataaatattttacggcgtaagtttaggcgcttggcggtgatgtgtaccttgttcgtagctgtaagccagcttgatcaaggttccttcatcaaaggcgcgacccaggaattccatacctacgggcaaaccatcagttgtgaaaccggcaggtacagtgatggccgggaagccggagaatggactcagacggttgttaccaccggagttttgtccttcgccaataacaccagcggcttgtgtggacgtaggatagatgatggcatccagattattatctgccataactttcagcagggactcacgtgtaacttgggtacgtttcaggacgatgtccttgtattcggcagtctccaacgtttggcgtgcatcccgagtcttcatggattgctcctgagatttgtcgaactctccggaagcgatgatctcggacagactgtgatatggagcgtctgcacccaatgagtccagatagtcattcaactggaacttgaattcatatccactaaggcttggatatttattgatctcagtcaagttcgggatggagatgggaactgcggtagcgcccagtgtcttcagttcttccacagcggtgttgatcacgtcagcaacggctttttcttcagctttggtacttgggatgagttctgtagccacaccgatgcgtgcacctttcagtccgtttacatccaggaagtctgtatagctggaagggatttttccgaccgcgtaagctgtagcgacatcctttttatcatagccggctgtagcatccaacatgattgcagcgtcactaaccgtacgagccataggtccaccaacatcctgtgtcagagccaatgggataatgccttcacgactggacagtccgatggttggacggatacccacaaggctgttgaagctggatgggatacggatcgaaccgccagtgtctgtacccataccggctgcggcaaagttagatgcaatggctgcgcctgttccaccgcttgagccacctggataatggtccagggcgtatgggttaagcgtttgtccacccaatgagctggatgtggtgatgccaaatgcgaattcatgcaggtttgttttgcccaaaataatggcgccagctgctttgagtttcttcacttgttcagcatcgtgagcagggacggaatctttcagacagatacagcctgcggttgtaggcatgtcattggtatcgaaattgtcttttaccagaatcggaacgccatgcagaggcccgcgggcaccttgggctgcacgttcttcatccaattgctccgcaatttggagtgcatccgggttcagggttaatacggcgttgatgcttacaccttgatcatcgtatttctcaatgcggtccagatatttctgaaccagctcttttgatgtcagttttcctttcgtcattgcagtctggagatccatgatggttgcttcctccaggacaaacggttttatgtagttataaatgcggtctttcagtatggagaggtcattctcggtaagtacagcgtttggaaggaagagggaatcggtataacctttcattagccctgccgtattcaatgcgccaacagcacctgcgaaagtggcttcattcgggacatccttgaatgatacggtagtcgaatccagcttgagccattgttgcaaggcgaccgcagcatctttacgttgtacggttgtgccggagagcttgtccatggtaaaaggaacacctgcaagtgtagccgcttcttccatagcctgaacaaatgctgccggagttgctggcgcttttcctttggatacagctgctactgttgttttactcgtaagcgttgccgttgcggctgatgccgaaggtaccgtttctccccatgttgtggcaacaacagcacctgccagtaacaaagtcccactttttttcaatacagatccatgataagtcatgcatccacgctcccttcctgtgtctcattgatgtgtgtagcgattctgtttctatgcttttgacacattgtatagttatgtcaggtaatcttacaaggtttatatttatccaaaaaaacgtatacatcaatactttacagtgttaatacttattcatgcttctgtttacatgtactcagaaaaactattacatattatagtgtaaagaaatataacatagttttgataagttgattaaacatgaggttacaggaggcgagtagttaggaagtagagatgacagagcatacctttagtgtgaaatgatataatgaaaagataggaatagaagagacataaggtattacagagaggaagagatatgaagtgaagacattggtactcgcagaaaaaccatctgtagcacgcgaaatagccagagttatgggtgcgcgtgataaacataaaagttatatggaaggcccaaaatatatcgttacttgggcgcttggacatctggttggattagctgaaccggaggattacgacaaaaagtatgcaacatggaatctggaggacctacccattctgccagatcgtacgaaattgaaagtacttaaagagaccaaccatcaatataaagccgtgcagcagttgatgaaacgtcaggatgtaggcgaactggtcattgcgaccgatgcagcacgtgagggagaattgctggctcgttggatcatgcagatggcggggtggaaaaaaccttttaaacgcctgtggatttcatcccagacagataaggcgatcaaagacggatttgcttcgctgaagccaggcagtcagttcgaccgcctctatgaatctgcacgttgccgggcggaggctgactggatgatcggacttaacgtgacccgtgcattaaccgttcgtttcaatgcccagttgtctgctggacgtgtacaaactccgaccttgggcatgattatggacagggaaaatgaaattaacggtttccgctcgcaggagtatgagacgttaacggcagacatgggaggttttcaggctgtgtggcgggcagctgggggagattcacgaatctttgaccctcaggaaacgcaagaattgaagaaacgggtagacgggcgcaagggcacgattgcccaggtgaagaaaagcgagaaagtggagccacatccactggcatatgacctgacggaactgcaacgggatgccaaccggaaatatggtttctctgcaaagcaaacatcaaatgtcctgcaacgtctgtacgaacagcataaactcgtcacgtacccacgtacggacagtcgatacctgacttcggacatgacagctacgttgaaagaacggttggatagtatagccattggaccttatgcgtctttggcacgtcctttactgcgcaaaaatctgaatatcaccaaacggattgtggatgacagcaaagttacggatcaccatgcgattatcccaacggagcagacggtgcttctgaatcaattgaatccagaggaacgcaaattatacgatctgatcgtacgccgttttatcagcctgttctatccggcagcgaagtacgattcggttgcgatcacggttcaggtggggaatgactccttccatgttaaaggtacaacggtgaaagaaagtggatggcgtgaagtatacggcggcgattacagcgatgatgacgatgaccgggctgacgatgcagcagaccatgagcgtgcgcttttgccagatgtgcagcaaggacagtccgtgacggttcagcgttgccatattaaaagtggacggacgatgccgcccaaacggtataccgaagctgctttgctttcccagatggaaaaacatggactcggcactccggctacacgtgcggatattatcgagaaactggtcagttccgatacaatagatcgtcaaggcaacagcatgcatccaaccggtaaagggaaacagttgattgaactggctgccccgcagcttcgttcaccggatctgactgcccgctgggaagctgaactggaacgcatcgctcgtggacaagggaaaccgggaccgttcctggatggtatccgttcaatggcgaaagagctggtgtctacggtaaaaggcagcaaagcggagtataagccgcataatgtgtccaatagccattgtccggactgtaatgcacgtttgctggagaagaagggcaagcgcggcaagtttcttgtatgtcctaccgaggactgcgggtatcgtcgttcggcagaaaagagactctccaatcgtcgttgtgcgcagtgccacaaaaagatggaaatcaaagaaggtaaggcgggactatacgtacaatgtctaccttgtggtattacagaaacgttggataaggacaaacagcatgtgaacaaacgcgatcagcaaaagctggtgaaacaatatgcgaagcaggagtccatcggttccaatctgggtgaactgctgaaggcggctatggagaaaaagggagagtaacacgcttgagggtagttgaagtcgtataagatcctccgttttcaggcaacgtaagccaaggaggtgatacctacatgccgcataacaaaccagagaaaattcataaccagcaaaacaaagacagtatacgggaagagagtatcgctgtgcgcccggacaaagcagccaaaagagcaccaagcctgaacggtattccaaagcaggagtcctaggttagagcgaggttagcgttattacacaaaattgcggttccctatccggtgcgttgaacatgtctctgatgaggactataatggagacagggagatgtcccgggacagggggatcgctagaattatatgcaaaccggacttatattgtggtttttatttattaatgtagttggttatctggtgatgtcggatgataagaggcgtgcacaacagcgtcgtgaccgtacacccgaacggacgttattcttattagcatttataggcggtgctttgggagtctggatcgcgatgtatcggaaaaggcataagactaaacatcccagcttcaccattggcattccgttgttgttgttcttaaatgcggtaatctatggttactttattcaatgaacacatggaacaaatgcgtaaccattcgaacaagacttacgctgaagtgaaaggtgtatcattcattcgtctgatatgtaaattcattcgtataaatggttcattgtggttccggaacgtttaaggagttacatggttctgttatttaactgttagtttattacatgtcagaccgaagcttgcttcgcgtgctctacatataaaggaagggacgggattcacatgttattttccaaaatattagtggcttatgatggttccaaagcttcaaataaagcacttgatcgtgcgattgagctagctaaagtgtccccaaatgcagtactggatgtcattcatgcttttgatttcccgcgtgtattcatcggtgagggactggctccattgccaccttcacttaataatgactattacaatctggcggtacagacgacagatgaagcaaaagagcgaattcaggctgcgggtgtaacggccaatgtggacctgattcaaggagcagctgcggaagtattgcttgattttgccaaagaaaatgattctgatatcattattattggtagccgtggactgggtggtattcgggaatttgtcctgggtagtgtcagtcacaatgtggtgcagcatgcgcgggttccagtactgatcgtaaaataatggatgaagtgtgtacgcactgaaaagcaggaagccggttgtcttcgagagattgaagaggagccggctttcttttatgggatgaaatggatggttaagcgaatttaaagaagcaatttccgaacattatatttgtcaatatgttaaatgttcgtctttaagttgacattagctgtaggggattgttagaatgttagatgtgtcgatcaggtaagaataaggtcgagtaggaacgaaatatgtaataagagattacaaaaatgaacgatgatagtttgatagatatttgctcgtataacgccgggaatagggcccggaagtatctacccgggaaccgtaaatttccggactacgaggagatacggctgagagtcgcatgcaaccagatgcggacagcaagcccccttttggcatgcccaaatgagggatacgtatttcttggagtccggtgtccggagaaaatgtgatgttttcgcgggtagcggattttttcatttcacacgtaataagagttccttaatagtcagatgtaatcaaaaaagcgcagacgggagttggatgtattcatgtcactgcaagtcgctgtaattatgggcagcaagtcggattgggaaacgatgaaacatgcgtgcgaggtgctggacgagctggagattgggtatgagaaaaaggtggtctccgcccatcgtacaccggatctgatgtttgaatacgcagagcaagcaattgatcgaggattcaaggtgatcattgcaggggcaggcggggcagcacatctacctggtatggttgccgccaaaacgatgcttccagtcattggcgtaccggttcaatccaaagcattgaacggtctcgattccttgttgtccattgttcagatgcctggtggtattcccgtcgcaactgtggcgattggcaaggcgggggcaacgaatgcaggattgctggcagctcaaatgatcggtgcttttgacccggatgtccaacgtcgctctgaagctcgccgagagcgcatcaaacaagaagtactcgaaagtagtgaagaactatgagtagcacagggaaccaatccggtataacaggagagctgaaaaatgtcctgctgccggggaagacaaccatcggcattctagggggcggacagctcggacgtatgatgacgctcgcaggaacggcaatggggtatcgattcgttactcttgatcccgctgcggatgcgccttgtggtcaagttgctcgtcagattgaagctggttatgacgatgccaaagctgcacttgaactggctcggcaatgcgatgtcattacgtatgaattcgaaaatgtggatgcagaagtcgctgggctgctcgagcgtgagtcttacgttccacaaggaagtgcgttactgtacaccacacaacatcggttgcgtgaaaaacgtgcgatcgaagccgccggagtgagagtcgcgccttatcgggaaatcacaagtgcggatacgatgcttgctgctgttagcgaacttggagtgccctgtgtactgaagacggtgactggaggctacgatggcaaaggtcaacgggtcatccgggaagcaagtcaggctgttgcggcatacgaagaacttgcggctactggtgcggaactggtgttggaacaattcatcaagtttgaatgcgaaatatcggtcgttgtagcgcgtagtacaaatggggagatcaaaacgttcccgccagcggagaacattcatgtaaataacattttgcatgcttcaattgtaccggctagagttgccgcagatatccagattgaagctcaaaagctggcagcagcgatagcagaatcgatgaaggctgttgggctgctggctgtggaactgtttgtagcggcggatggaagactgtacgtcaatgagctggcaccaagaccgcataattccggtcactatacgatggaagcttgtgcgacttctcagttcgaacaacatatccgtgcgatctgcggattaccacttggggacacttccttattgagtccggttgttatggtcaatgtgcttggagaacatctggaaggcattatcgccagaacagggcaacctgatgcggaagcgatagaactcggtgtgattcccaagcttcatatatatggtaaaaccgaagcgaaaacaggacggaagatggggcatgtgaatctgctctgtcaggatgttgaagaaggattacaatggattgaacaaactaacctctggaggaatacaaattcatgattgaacgttatagcagacccgaaatgagagccatctggaccgaagagaacaaattccaatcgtggctggaagttgaaatttgtgcatgtgaggcgtgggccgaactgggtgttatccctaaggaagaagcagcattgcttcgtcagaacgcatcttttgacatcgatcgcatctatgagattgaaaaagaaacacgtcatgacgttatcgcatttacacgtacggtatctgaaagtctgggtgcggagcggaaatgggtgcactacggactgacttctacggatgtcgtagatacggctctaggttatgtattgcgtcaagcgaatgagattctggaaaaggatatcgtgaatttcattgaaattcttcgtgaaaaagcattggcttatcagcacacaccaatgatgggacgtacgcacggtgtgcatgcggagccaacgacatttggactgaaaatggcattgtggcatgaagagatgaaacggaacctggagcgtttccgccatgcagcagacaatgtacaatacggcaaaatctcaggcgcagtaggaacgtacgcgaacatcgatccgtttgttgaagagtttgtctgcgagaagctgggcacgaagcctgcgccgatctcaactcaaacattgcaacgtgaccgtcacgcagaatatatggctacactggcgttgatcgcaacgtccctggacaagtttgctacagaggtacgtgcactgcagaagagtgaattccgtgaagtggaagaagcttttgcaaaaggtcaaaaaggatcttccgcgatgccgcacaagcgtaacccgatcggtagtgaaaacatctccggtctgtcccgcgtcattcgcggacatatggtatcggcatacgagaacgtaacgctctggcacgagcgcgacatctcacattcttccgtagaacgtatcattctgccggatgctacgatgctgctgaactacatgctgaaccgttttggtaacatcgtgaagaacctgacagtattccctgaaaacatgaaacgcaacatggagcgcacctacggggtaccattctccggtcgtatcatgacaaagctgatcgacaaaggtttcagccgcgagcaagcatacgataccgttcaaccacgtgcgatgcaagcatgggaagaacaacgccagttccaggatatcgtgaaatccacaccggaaattacggaagtgctgaacgaagaagaaatcgcagatgcattcaacccgtcatggcacctgaagcacgttgacacaatcttcaaaaagctcggcttgaacgactaatatattaaggttttgaattattctactctctaaaagtataggttgattatgtgttcacgctggaacggagaaggcagaaaaaacctgaagaagcaaagcgctcgcctttatccccgaattttcactttgcaaaagtggaatcaaaaaatctggggataacagcgatcggaaggttgttctgcattcggagtggccccgcgtgatgaggggaattggacgtatactttacatctcctgaaagaaggtgagcccatggcactgtccactgcggcagatctcgttaaagcacctctgttatataaaggaaaagtacgtgaattgtacgatctgggtgaacattttctgattgtggttaccgaccgaatctcggcatttgattatgtgctggacccggcagttcccgagaaaggaaacgtactgaataaactcagcagtttctggtttgaactgacaggtagcatgacggagaatcacgtcgttcataccgatgtgaatcaactgggtgatctcatcacagaccctgaattgctcaaagaccgcatcatggtaacccgcaaagcagaacgcattgatattgaatgtgtcgtgcgtggatacatcacgggtgggggatggagacaatacgagacgagtggtgaagtgaatggcattaaactgcctgacggacttcgcaaaaacgccaagctcgaagttcccattttcaccccggcagccaaaaacgatgttggtcatgatgaagatatcccaatggatcgcatgaaagaactggtgggagacgcactcgcagttgagcttcaggaaaaaagcctgcgactgtacgaattcgcccgtgattactgtgatcagcgtggcatcattctggcagattgcaaattcgagttcggcattgtggatggcaaggtcatcctgattgacgaaatcttcaccccagatgcttctcgcttctgggccaaagagaattatgaacttgacatcgagatcgacagtatggataaagagccagtgcgcacctatctcgccggaaccgattgggacaagaacagcaaacccgatccactcccacaagaggtagtagagacaacaaccgcaagatacgtcgatatttataaccgtttaacgaaataataaagtttaacgtttgaggagactaacgtttgagcgggctacgggaaagtttggctttcgatcgctgttgcccccggaatgttttgattggaatccttttttcaaaaggaaacattccggttgcaaaggcgaacgcttcgcttctctagctcaaatctttccctccgccagtgttcaaactggtgggtgaggcaattaagagcggtggcttcccacaggtaggggaagcctgaaaagattgcaagattcaaattcattgattcataaagtaacttaaagaccattacacaccgtgcaacgtaaaaggtttaggcctttaaaaaacgtcgcatggactagcggaggggcggaattgttcttaaaggagcgatagcgttcgcctttgtccccgggttttgaccgcacagcgggccaaaacaatcaaaaaacctggggacaacaagcgaccggaaagaacaatccgccccggagcaagcaccaaaagtaacttttttaacagcataaagcatttatcccgttcattactgaggaggaacataaggatcatgatcaaagcaaccgtatatgtcactattaagcaaagcgtactcgacccgcaaggcgtagctgttcaaggagccctgcattctatgggattcaacgaagtggaaagtgtacggatcggtaaagtcatggaattgaacctggatacaacagatcgtgcggaagcggagaaacgattgaaagtcatgtgtgaaaagttgctggccaacaccgttgttgaagattaccgctacgaattggagggttaatctcatgaaatttgcagttcttgtgttccctggctccaactgcgacatcgactgttataaggcagtggaagatgccattgggcaagaggttgattatgtatggcacacggctacagatctatcggcttatgattgtattttagttccgggtggtttctcttatggtgactacttgcgttgcggagcgatttcccgctttgcaccggtaatgaacgaggtagcgaaggctgctgaacaaggtaaatatattcttggtatttgcaacggattccagatcctgacggaagcgggattgcttccaggtgcattgatccgtaacacttccctgaaattccgttgtcacgatacggtattgaaagtggcgaatgcagatacaccatttacacgtgactatgcaccaggcgaagagattatcatcccgattgctcacggtgaaggcaactattattgcgacgaggagacgctggcgagtctgcaagcgaacaaccagatcgtatttacgtacgggaccaacccgaacggttccctgggtgatattgcaggagtctgtaacgaggctggaaacgtggtcggcatgatgccgcatccagagcgtgcagtggactcattgctaggttcggaagacggcaaacgtatgtttacatctattttgaaagcatggagggatcggcatgacgcagcagctatccgctaaggaaccaacagcagaacaggtcgcagaacataaactttacgcacaaatgggcgtatctgacagcgagtatgcgctgatctgtgagttcatggggcgcaagccaaactacacggaaattggtgtgttcagtgtaatgtggtctgagcattgtgcttataaaaactccaagccattgctgcgccgtttcccaaccactggaccacgtgtcctgatgggacctggtgaaggtgccggtatcgtggatatcggtgataaccaggccgttgtattcaaaattgaaagccataaccatccttccgcggttgagccatatcaaggtgcggcaacaggtgtgggaggcattattcgtgatattttctccatgggtgcaagaccagtagccatactgaactcccttcgtttcggtaagctggagagcgatcgcgttaaatatttgttcgaacatgtggtagcgggtattgctggatacggtaactgtatcggtattcctaccgttggtggcgaagtgatgtttgatgagagctatgaaggcaatccactggttaacgccatgtgtgtgggtctgattgatcatgacaagattcagcgcggcgtagctaaaggtgtaggtaaccctgtgtattatgttggtccgccaacaggccgtgatggaattcatggagcaacctttgcatcggttgaattgacggaagaatccgagtcccaacggacagccgttcaggtcggtgacccgtttatggagaaactggtgatggaatcttgtctggaattgatcgacacgggaatcgtgctgggaattcaagatatgggtgccgctggtctgacatgttcgagtgcagagatggcaagtaaagcgggtaacggtctggaactgtatctggatcaggtaccacagcgtgaagaaggcatgacaccttacgagatgatgttgtctgagtcccaagaacggatgttgttcgttgttgagccgaaggacgaggcgcaggcgatggaaatctttgaacgttggggcgtaatctgtgccaaagttggtaaagtaacggatgacggtcgtctgaaattgatccaccacggcgaagtggtcggagatatgccagtaacggcactggttgacgaatgtccagtgtatgacaaaccttcttctgtacctgcctactacgagcaaagtgcttccatcgacacgcttcgttacgacgaagtgtcggatctcggcggagcgttgaaacaagtattggcttcaccaacagtagctagtaaaaaatgggtgtatgatcaatatgactacatggtgcgtacaagcactgccgttcgtccgggttcggatgcggctgtagttacgattcgtggcacacgcaaaggtctcgcaatgacaacggactgtaatggacgttatgtgtatcttgatcctgaagttggcggacggattgccgtaagtgaagcagcgcgtaacattgtatgttccggtgctgagccactggcgattacggacaacctgaacttcggtaacccggagaagccggatattttctggcaaatggagaaagcggtagacggtatggcagaagcttgccgtgtgctggatacgccggtcatcggtggtaacgtaagtttgtataacgaaaatgccaaaggctccatctatccaacgccagttgtcggtatggtaggtctcgttcatgatacggatcatatcacgacacaagcattcaaatccgaaggtgatgtcatcatcctcctcggtgaaacaaaagctgaactgggtggcagcgagctgcaatacgcggttcatggtcagacggaaggtcgtccaccagaactgaacttgcaaacggaaaaagcattgctcagcaccgtgctggaagctattcaatccggtctcgttcgctcggcacatgacttgtctgaaggcggcttggctgttgcactcgcagagtcttgcatcagcggtaatgttggagcacaggtgaatgtagagactgcactgcgtgcagatcacgccctgttcagtgagagccaatcccgtatcttgctgtcggctacgcctgagcaagcgggtaaacttgaagcttttgtacgtgagcgcggtgtacctgtagctgtgattggatgtgtagaaggaagtaacctgacgattgaattgaacggaacatcagccgtgagcgaacctgtaggaggtttggctcaggtctgggaggatgcgattccatgtctcatgaactgacgacaggaccgttgtggacaggcgattattataatgaagggtccggcaaggaaggactcgacaaattgaaggaagaatgcggcgtgttcggggtgttcagacaccctgacgcggcttcgctctcctattatggactgcatgcgctgcaacatcggggcgaagaaagtgcaggaatgtgtgtgagtgatggcagccagtttaactatcatcgcggcatgggtctggtgaaggaagtattcaccaaagacctgatgcagacgttgaccggggatatttccattggacatgtccggtattccacaagtggtgacagtaaactgacaaacgcacagccattggtattcaaataccgtgatggtgatctggcagtagcaaccaacggaaatattgtgaatgcaccaacgatccggcgtgagctggagcagagtggttccattttccaaacaacaagtgataccgaggtcattgcgcatctaattgcacgatcctccaaagggcttgtggaagcggcaaaagaggcgttccagcgcattgtgggtggttatgcatttctgatcatgaccaacgacaagttgctggttgcttccgatccgcacggacttcgtccgctgacgatgggtaagctgggagatgcatatctgtttgcatctgagacgtgtgcactggaaacaattggcgcagagttaatccgtgacattgaaccgggtgaactacttgtgttggatgcagatggtctacatgaggatcgctttgatcatcacaaacaccgcaaggcattatgcgcgatggaatatatttattttgctcgtccggatagtgatatgaatggtacgaaccagcatgcggcccgtaaacggatgggaagccggatggcgattgagtcgtttgtggatgcggacttggttacgggggtaccagattccagcatctcggcggccattggatatgctgaacagacaggtattccgtatgaaatgggtatgatcaagaataaatacactggacgtacgtttatccagccaagccaggaattgcgggagcagggcgtgaagatgaagttgagcgctgtgcgtcgcgttgtggaaggcaaacgtgtggtcatgattgacgactccatcgtacggggaacaacttcccgacggatcgtgaacatgctacgtgatgcaggagcaacggaagtacatgtacggattacatcaccacctttcaaaaacccgtgtttctacggtattgatacgcctgacagccgtgaattaattgcttcacagttgtcggtggaagaaatttgccgtgaaattaatgcggactccctggagttcctcagtcccgatggactgattgcatcgattcagggagataatcaggatgaccctaaaggcggactatgtctcgcatgttttgatcatgattacccaacccgcctcgattttggcggcgaggaaaaattcggttgcagctgttagctctcaagccccgctttgcggagcaataggggttaggcagccaggcgaagcagctgcccccgggccaagcccgagcccttaagccccgctttgcggagcaacaggggctaggcagccaggcgaagcagctgcccccgggccaagcccgagcccttaagccccgctttgcggagcaacaggggcccaggaagcggtgcgaagccagctgcccccgggcctagcccgagcccttaagccccgccttgcggagcaacaggggctaggcagccaggcgaagcagctgcccccgggcctagcccgagcccttaagccccgccttgcggagcaacaggggccagggcagccaggcgaagcagctgcccccgggcctagcccgagcccttagccccgccttgcggagcaacaggggccaggcagccaggcgaagcagctgcccccgggcgtagcccgcgcccttaagccccgctttgcggagcaacaggggccaggcagccgagcgaagcagctgcccagcgggcttgccccgcagcgcagctgagcagggttcgccgaccgatggcttgcagccaacggaatcggcgaacaatcccgcgagatcacgcacgaattagccatagcaagatcataccagccacctctgcaccgcttttttggcgggtgtccagagggcctgccaaggtcctatggggtcctcccgggcgggaggatttaggtggggcgaaaaaaaaggagatgattccacttgtctgaagcatataaaaaggccggcgttgatatcgcggcaggtaatgaagcggttgaacggatgaaaaaacacgtgaagcgtaccttccgtccggaagtgatgacggatctgggtggattcggcgccctgttcggtttgaacaaagataaatacgatgagccggtgcttgtatctggtacggatggcgtaggcaccaagctgaaaattgcatttgccatggaccgtcacgataccatcggaattgacgcggtagcgatgtgtgtgaacgacattgtggtacagggtgcagaaccactcttcttccttgactatctggcatgtgacaaagtcattcctgagaagattgaagctattgttgcgggaatcgctgaaggctgtcatcagtcgggatgtgcgctgatcggtggcgagacggcggaaatgccgggcatgtacagtgaaggcgaatatgatattgccggattcacggtaggcatcgtggacaaagcaaagattatcaacggcacaaccattgctcctggcgacacagtgattggcctggcttccagcggtgtgcatagtaacggattctcgctggtacgcagacttttgttggaagatgcgggtcttgatctgcatgatgaagtagcggaactgggtggtaagctgggagattcactgctggaacctacaaagatctatgttaaacccctgttgtccttgctggaaaaggtaaaagtaaaaggtatggctcacattacaggtggtggtttcatcgagaatatcccacgtatgttgcctagcaacgtgaatgtggatattgactacggctcttggccgatcctgccaatcttcaacctgttacaggaaaagggtgctgtctcgaaccgtgacatgttcaccacatttaacatgggtgttgggcttgtactggtcgttaatgaagcagatgcaacggaagcactgcaacaactgaaaacttctggtgaagaagcgtacatcattggccgtgttactgaaggagatgcgcgagtaaccttcacgggagcggatgtttaatggcgaactaccgcatagctgtatttgcctcgggtgaagggtctaactttcaatcattggttgatgcagtacgaaacggtgggctggatgtatccgtagatctgctcgtgtgtgataaaccggctgcacgcgttgtgcagcgggcacaggacgcaggcgtggactgtcatctgtttactccgaaaaattatgcttcccgtgaagcctatgagtcagagatcgtggaagtgcttgaatccagaaagatcgacctggtcgttcttgccggatatatgaggttgctgacttccgttgtggtggatcgttacgcagggcggttgattaacattcatccgtccttgctaccggcatttgcaggtaaggatgcgattggacaggcattggaatacggcgtgaaagttacgggtgtgaccgtgcactttgtggacggaggaatggataccggaccaattattgcccagcatcccgttcccattttgccagaggatacgcctgagtcaatcagccgttccattcatgcggctgaacagcagttataccctgaagttgtttcctggttcgcgcaaggtctggttcagttagacggacgtcacgtgactgttaacaaaccggtttgatatagttttaaactttttcacacattaacggagaggacagaaataagctgtagaagcgaagcgctcgcctttattactggatttttaccattgagaaattgttcaaaaaaatctaggaataacagcgatcgaaagattattctggactcgtagtgttttagtgtgaaaatctatttatcaactgtataacagaagtcgaatattggtacgcattttgtgatatttctcgggaaataaatcggctgtgtttcgtcaggaaacgcgaagccatgggacattaaaggaggagcatattgtgagtatcaaaagagcgctggttagcgtatcggataaaacgggcatcgtggacttttgccgcgagctgtcgcaaatgggtgtggagattatttcgacaggaggtacaagcagcctgttgtcgaaggaaggcgtacctgtcatcggaatttcggatgtgaccggattccccgaaatcatggacggacgtgtcaaaacattgcatccggcagttcatagtgggttgttggctgtgcgtgataacgaagagcacacacgccaaatggaagaactcggtctcggctatatcgatctggttgtcgtgaacctgtatccattccaagagactattgcgaaaccggacgtagcatacgaagatgccatcgagaacatcgatattggcggtccaacgatgcttcgctcggcagccaaaaaccatgcctttgtcagtgtcgttgtagacgcatctgattacagccaagtgctggaggaagtgcgcaacgatggagataccactctcgaaactcgcaaacggcttgcggcaaaagtgttccgtcatacggcggcttacgatgcactcatctccgactacctgtccaacgtaaatggcgatccactgccagagcgtctaacggttacttacgaaaaactccaggatttgcgttacggcgaaaatccacaccagcaggcggcattctaccgcaaaccgctggctgcacaagatacgttgacaacagccgagcaattgcatggcaaagagttgtcttacaataatatcaacgatgcgaacgcagcattgcagattgtcaaagaatttgaagaaccggccgttgtggcggttaaacatatgaacccatgtggcgtaggtattggcgcaagtatctatgaagcttacggcaaagcatatgctgcagatccaacatctatatttggtggcattgtggcagcaaaccgcattatcgacagcgacacagcaggcaaattaagcgagattttcctggagatcgtacttgctcctgactttacacaagaggctctcgatatcctgacgaagaagaaaaacattcgtttgctcaaaacgggtgaactgaatgctgctcgtaaacgggagagccagttcgtggtaacgtctatcgacggtggtatgatcgtgcaacagtccgatgtacactccatcgaagcgagcgagctgaacgtggtaaccaatcgtgcgccatcggaagaagaactgaaacagctattgtttggctggaaagtagttaaacatgtgaaatccaacgctattgtgcttgctgcgaatgacatgacagtgggtgtgggcgctggacaaatgaatcgtgtgggtgcagccaaaattgcgattgaacaagcgggcgagcaagcaaaaggggctattctggcatctgatgcgttcttcccaatgggtgatacgctggaactggcagcaaaagccggaattacagcggtaattcaaccgggtggttcgatcaaagatgaagaatccatcaaagtagcgaatgaatacggaattgccatggtcttcacaggcgttcgtcacttcaaacactagaacgaaaaaggtttaataaggggtgtcgcctgtcatgctaatgacttatggtacaccccctattttttagtttttttaacacgcaatagcgtaacaaattcagttatgcacggaggggaacagagcgaatggatattctggtagtaggcggcggtggccgggaacatgcaatcatctgggcactggcgaagagtccaaaggtagacaagattcactgtgcaccgggaaatgcaggcattgctcaactggctgagtgtcatgccattgcggtgaatgaatttgataaactaacggctcttgctgtagagcttaaagtaggtctggtggttattggtccggatgatccgcttgcagatgggatcgtggatgcatttgattcgacaggtattccggtattcggacctcgtcgtaatgcagcagagatcgaaggaagtaaaacgttcatgaaggacctgctgcacaaatacaacattccaaccgcagcctatgagaaattcgacaattacgaacaagctcaagcatacctgaatgagcaagcaattccggttgtcatcaaggcagatggactggcagcgggcaaaggtgtgaccgtagcttattcgcgtgaagaggctgatcaggcacttcgcagtatcatggtggacaaagtatttggtgaagcaggagccaaagtaattatcgaggaattcctcgcagggcaggaaatgtccattctggcatttgttgatggggagacggttcgcccgatggcggcggcacaggatcacaaacctgtattcgacaacgaccaagggccaaacacaggcggtatggggacatactcacctttgccacatatccctgcttctattattgaggaagccgtggagacgatcatcaaaccaacggctaaagcgatggtatccgagggacgtccattccagggtgtattgtttgccgggctgatgatttcaccagatggtaaaccaaaaacgattgagttcaatgcacgtttcggtgatccggaaacacaggtcgtattgccacgtctgaagagcgacttgtttgatatcttctgggcaaccgttcatggcaagctggctgacattgagattgaatggagcgatgaagctgctgtatgtgtggtacttgcttcaggaggttatccgggtccttatgccaaaggtgtagtgattgaaggactggaccaagtagatgacgccgtggtattccacgcaggtacagcgcgtagtgaagcgggagactgggttacgaatggtggacggatcctgggcgtagttggccttggtgcggatattggagaagctagaaataaagcttatgaacaggcggagcgtatccattttgatggtaaacatcagcgaacggatattgctgccaaagcactcgtatagaatgaatataagagcccgtaaagatgtataccggaaaggtatttgcatcttgcgggctctttgctacgtatatagatgtatcttgtgtaaacggctggacttgtccatacgggaaagaacatgggaaagatacgaaacaggattaaatcagggaaatcacgcatgtttaatgccctaaagtaaggggtagtatttttataaattggactatactaaacatgtgaagattatcacattatgaggtaatatcaatcatattatataaagtatgtaacatacatagagactaatttgtgaacattatactgtaagcttgtggcaaaccattacgtgcaactggatggttgagcgggaaacatggtatacttttcggaaacaggaatgagtacaaggggaggtggatatctattgggtaggcgatattgtaaattgtccaaatggcgaatctaggtggagttaagcgaggaacaattgacagcatgaggggtaacccgatttgaatgaagaagtttctgcaagtcattgacttcatcttgaattcctgttttgtaattttacaaggtcaaacgtaagacttatacaaaagatatcattgaaatcaattttatataaggcagacgtcgtgttgaaagactaacagttgatgaatggttaacacagttaacggatcacgctgtaactatctctggaggtgaatccctgagaaccggggaaatcattggacataattaccatattgaatatcgttttacttattatcttgattgcattgactgcatttttcgtagcatcggagttcgctgtagtcaaaattcgtacatcaagagtggatcaactggtcgcggagggcaataaaaaggccgtattggctaaaaaagttgtctcggacctggattattatctgtcagcctgtcagctcggtattacggtcactgctctgggactgggagcgctcggaaaaccgacggttgagagattgttatatccggtattcaattatttagatgtacctgcttcaatctcgtcgattgcttcctatgcgatcgcctttatcctcgtcacgttcttgcacgtggttgttggtgagatggcaccgaaaacgttggcgattcaattttcagaaaaactgacattaatgctcgccccatcgctatactggtttggtaaaatcatgtatccgttcatctgggcgcttaatggaacatcacgtgttcttctgcgaggattcggtgtgaagcctgccaaacatgatcaagcctactcggaggatgagatcaaaatcatcatgaaccagagttatgaaggtgacgagaacaacaagaccaagctttcatatctggaaaatgtatttgtgttcgatgaacgtgatgccaaagacatcatggtacctcgtacagaactggtgacattagatcaggatatgacctatgacgatattattcctatattggatgaacataactactcacgttaccctgtcatcgaggatggggacaaggaccgcattatcggcgttgtgaatgtgaaaaagattttgcctgacatggtagccgcaagatcgtatcaactaagcgagttcgttcgtgagatcccatttgtttccgaagttacaagtatccaggatgcaatgattaaaatgcagcaggaacgtgtacacatggccgtggtcgtggatgaatatgggggtacctcgggtatcattacgatggaggatattctggaggaacttgtcggtgagattcgcgatgaattcgatgccgatgaggtggccgatattcaggagaccggagagaatcaatatctcattaatggtcgggtacttttggatgaagtggagcggcagttcggacttagctttgaaggtaatgaagagatggataccgttgctggatggatccagtaccagaagggtgtaggtgtggaaaaaggcgacacggtagaacacggcgattatgtgtggaccgttgttgataccgaaaactatcacatcaaacaagttcttctggagcgggtaaacggcgcgcaggtcgaggaagcgactagcgatctggcgtgatcttggttggttcgatctgactgtaatctagggtttgactgcctatttggctactgccctcagaatttaaaacgttttggcaacgtagcagtgtaggggacggaatcgatcctgaagaagcgtagcgttcgcgtttgcaaaccaattttaaacctttgaaaacaataatcaggaaaatttggaggcaatggcgatcggaagaacgagccgtcaccggaacgtcactcgtgcaaaccttattttaaaatttaatggaggtgaatccctcaacccgagggaaatcattggacggaataatagccttgaatttatttttagtagccgtatttataggtctgacagcctttttcgttggagccgaatttgcaattcttaaagtacggatgtcccgaatcgatcaattgatctcggaaggcaacaaaaaggcagtactggccaaaaaagtggcgcacaacctggattattatctgtcggcgtgtcaattggggattaccatcacggcgctggtattgggagccttgggtgaacctactgttgagaaaatgctgcatccgctctttgagcgaatggaagtaccagcggcattgtctaccgtgctttcctatggtattgctctggcgatcattacgttcctgcacgtggttattggtgaattggcaccgaaaaccctggcgattcagtttgcagagagaatgacgctgttgctggcaccaccactgtactggttcggtaaaatcatgaatccattcatctacgcgctaaatggagctgctcgtctgttgcttggcatatttggtgtaaaacctgccgggcatgataccgttcactccgaagaagagctgaagctgattatggcacagagctacgagagtggcgagatcaaccagacggagctggactatctcaaaaacatttttgcttttgatgagcgtctgcttcaggagattatgattccacgagataaaattgttactctgaataaggaaatgccgattgatcagatcattgagacgctaaatcgacatgaatacacgcgataccctgttattgcaaatggggatcaggctcattttgttggctttattaatacaaaagaaatgctgacgagtgtggctgcgggcagagatttcaatatggagacatttgttcacaatacgccgagtttctccgagcgttctccaatcaaggatgtactgatccagatgcagcaaagccgtgtacacattgcaaccgtgaaaaacgaggcaggtgctacggtaggtatggttacgatggaggatatccttgaagagattgtcggagatatcaaggatgaatacgagcataaagatttggtgaatccaccaaaaagaatgaaactggtttaagaagcagtaatgcaaaagtaatacaggaatacgaagcaacctaatcaatcgttatacgctaagcaggttcccggagtgatcgggtcctgctttttgtattaaatcttaattttaaaataaaagcttgcatattgaggtccaatggattaatataaatttaaagaatcttaacttaaagataaataacagaaaccaataaataaaagaagcaaaaacaacctatgatacaactaaaaccaagggagtggagattatgttcagaacttcaggaattcatcatattacagcttttgttgacgatgcgcagaaaaacgttgatttttatgcagctgtgttggcgctcagactggtgaaaaaaacaataaactttgatgcaccggacgtgtatcacttgtattacgggaatgagcagggtgcaccgggcacaatcattacctttttcccacagcagaattcaagaagaggtgtcattgggtcaggtcagactggagttaccgtatatgcggttcctgtaggaagcctgcctttctggaaagaacgtcttgcttccttcgatattccatatgaaaataaaaccagatttggtgagcagtacattcgtttcttcgacaaaggcggtctgttgcttgaactggttgagcgtgaaggcggtcagcaaagcaactggagtttcaacggtgtgacaccggagcatgccatcaaaggatttggcggagccgtattgttcagccacgttcctgagaaaaccatggacgtcttggtgagcaaactgggtctggagcaagtcggtgaagagaacggactccttcgtcttcaggcaagcggcgatattggtcagatcatcgatattcagtccacaggtatccaacgcgggattggcggagccggaacggttcaccatattgcatggcgtgccaaagattacgcggaacatgaacaaattcagcaggatcttgaacaatccggatatcatccaacgccagtcattgaccgtcaatacttcaacgctgtgtatttccgggagccgggtggtatactgttcgaactggctacggatcctccgggatttgcacgggatgaaccagcagagagcatgggtgagaaactgatgttgcctgaatggtatgaaccacagcgtgagcagattgaacaattgttgccacgaattgaagtacgtgaatggaaaggagagtccaaatcatgaccacaaccaatacaatgaaacatatctataaagcaggtgctcagccggatgcgccaacaatcctgttgcttcatggcacaggcggaaccgagaatgatctgatcggtctggcggagatgatcgcaccaggagctggcatacttggggtgcggggtaatgtatcggagaacgggatgccccgtttcttccgccgcctggccgaaggcatttttgatgaagaagatctgattgctcgtacggcagagctgggatcttttgtcgatgcagctgcggtggaatatgggttcgatcgttccaacgtgtatgcactgggttactctaacggtgccaacattgcggcaagcttgatcttccatcaagcagatgtattcaaaggtgcaattctgcatcacccgatggtaccgttgcgcggacttgaactgccggatctgaaaggcctgcctgtgttcattggtgcgggcgagaacgatccgattgtaccaagacgtgaaaccgaggaacttgcttcgctgctcagcggtgcaggtgccgatgtaaacacgcattgggagcgtcagggtcatcagttgactcgtaccgaggcagaagccgcggcagcttggtttaagactcaggcgtaaattgggtggatagacggttatgaaacgtgtagagacagcctgatcgtgaagatcgggctgtttttcctttttattttgatcatcgtcaggaagaagaaatgattgactggtgttatgtaaccgttactaaccgggtaaacatttgaatgtgtggtagataaccttgtatgcttagtgatatagctatgtatcaacatcatgaactggaggggttaatgtggaacgtaacatcaaggaactggtacagcggatgacactggaagaaaaagcgggcatgtgctcgggactggacttttggcatctgaaaggggtggagcgtcttggcattccatccatcatggtgacggacggacctcacggactacgcaagcaggatgggagtgcagatcatctgggtctaacgtcgagcgtgcctgcaacctgtttcccgtctgcggcaggattggctagttcatgggacaaggagctggcgcgtcaggtcggggtggctttgggtgaggaatgtcaggccgaggatgtagcggtattacttggaccgggtgtaaatattaaacgttccccattgggtggacgtaattttgaatacttttccgaagatccgttgttatctacgcagatggctaccggtcatattcaaggtgtgcagagccagggtgtgggtacgtctctcaaacactttgcagttaataatcaggaagaacggcgtatgtcgattgatgcggtggtagatgaacggacactgcatgagatctatctggcgagcttcgaaggtgcggtgaaggatggacagccgtggacggtgatgtgttcttataataaggtgaacggtacgtatgcaggtgagaatgaatggttgcttacggatattctgaaagacgaatggggtcacgaaggtcttgtggtatcagactggggtgcggttaatgaacgtgcagatgcccttgcagcaggactggaactggagatgccaacaagtggtggaatcggtgagcgtaaagtgatcgatgccgtagaaagcggacaactgccgctggacaagctggatcgggcggtggagcgtctgcttacgctgatctttaatgccgttgatcaaaagcaagatggggctgcatataacaaggatgagcatcaccaacttgcgcgtaaggtggcagccgagagtatggttttgctgaaaaatgaagaaggtatcctgccgcttgggcgtgaaggcgatgtggcgataatcggggcatttgcgcgtaaacctcgcttccagggcgggggaagttcccacattaatccgaccaaagtggatgatattgtggaagagatgacacaggtggctggcgaaagtgtaaccttctcgtatgccccaggttatcggattgaagcggatgatgtggatgagacattgatgcatgaggctgttcaggcagcacagtcagcggataccgctgttgtgtttgttggattgccggatcgttatgaatccgaagggtatgatcgtgcccatttgcgtttgcctgacaatcatattcgtctgattgaagagattgcaaaagtacaatcacgtgtggttgtggtgctgagtaacggatctccagtggagatgccttggttgccgcaggtgcaagcggtgcttgaagcttatcttggtggacaggccgttggtggagcgatagctgatctgctgtatggagaggtgaatccgtccggtaaactggcagagacattccctgccaaactcagtcataatccatcttatttgaatttcccgggtgaaggggatcgtgtcgattaccgggagggtatctttgttggttatcgctattatgataaaaaagagctggagccactgttcccgtttggttatggactgagttatacgacatttgaatatgctgatctgaaggtagatcgcacagaattgaccgatcaggatgaggtgaatgtgcaagtaagggtcaccaataccggtgacagagcgggcaaagagattgtacagttgtatgtcagcgatgtagagagcacagttattcgtcctgtaagagaattgaaaggatttgcgaaggtggcccttgaacctggagagtccaaagtggtgagcttcacactaaacaaacgttcattcgcctattacaacgtagatatgaaggactggcatgtggagaccggagagttcgagattcaggtaggcagttcctcacgggacattcatgtgcacacacgtgtgaatgtagagtctacagcgacattccttccaacctatacgcgtaatagtacattgggtgatatccagcgtgatccggcccataaacagctactggaccaggctttgcaacaattccaggaagccagtgggttcggcggtgatgatgccggggatcatgcagatatgatggatgcgatgatgaaatatatgccgctgcgagcactggttgcgtttagcggtggggccatgacggaagaagcgatgaatgaacttctggagcagctgaacaacaaggatcatggtattaggggataaggggctgtgctcttaaaccgagtattcgtccatccttggattaagcgattacgatgatgcgatacgtgcaggaactgcgcccgaagcaacaagaaggtgtatgtgaggtccagggcacagtggctgggacagttacccgatccgatcatggatcgggttttctttttgcataaggaaaaaggagggttaacgggacggtgggatggaggatgactctagcaacgtgacagaggtgacaggactgctgtaacttgctgaagcaacatggttgtcgtaaaggatggattaatctataatgaagtaattgataatcattttcaattagattcagtgatagatgattatgcacgtaatcaggaggggaatatgaatcctaaccctagcttacatacatttggttcaagtgcgtttgttcagacccgtgatggtcgcaaactacattatatgtccaggggaacaggagagctgacggttgtatttgagtccggtatgggcgcctccagatcaaactggggactggttgcaccagccattgctgagcatgcacgtgcagttgtgtatgacagggcaggggcgggacgaagtgatgtcgactcggctccccgcagccttgaacgcattgcaggggatcttggagaactgctgacagctctgggcccgggcccattcattctggttggacatagctggggcggtccgattgtacgggctgcggcagctgcacatctatctcgattacgtggcattattctggtagatccatcagacgagcattgcgaaatgtatttttccaagcttactaaaaagagctttgccatcaatggtttcattattccaatcatggcgcgaactggcttatataagatgcttggcagcaaagctggaagtgttcagcctgacgatgtggcagcggatcacctcaaggaggatttcactgtacgggcagccagcacgatgcttgcagaaggcaaaacatttctggatgacatggcagggctcctggaacatcctccggctctgggtaatctggaagttagcgtgatctcgggtacgaacccgggcaagggagaggggaaaatcagacctgctctcatcacggcgcatcgccagacggtgagccagctatccaatgcgaaatggattggggcagatcaatccggtcatatggttatgtatacagaccctcaggttattattgatgaaattgtacgaatgataaatgacgtgagctcaggcgcaagaacagaacaaaagtgatacaatacaaagaaaagcagtgcgcgacattgctagataataaaagcggagtgtggagacaacatgaaaccagttgaacaagaaccaacgggaaccacaagtcccggtcgtgccagtgttggcatggaagatatcgtacgcgcacatcatgtgttgcgtgaggtcattgtaagaacgccgttacagcgggatgctgtattgtcggccaaatataactgtaatgtgtatctgaaaagggaagaccttcaagtggtgcgttcgttcaaaattcggggcgcctacaatatgattcgcagtctgacaccagccgagatggagaagggtattgtctgtgcaagtgcgggcaaccatgctcagggtgttgcttttagctgtaatgcgcttggaattaacggcaaaatcttcatgccgagtacaacaccgaaccagaaggtgaagcaggtgcgtcgctttggtggaaacaacgttgaagtggtgctgatcggggatacgtatgacgatgcatacgcagaagcaatgcgtgcatgtgacgaacagggcatgacgttcatccatccttttgatcaaccgaagattattgcaggtaatggtacggtagcgatggaaatcatggaaagtctcgatgagaatgccgactatgtgttcgtgacaattggtggcggagggttggcagccggcgtgggaacctacatgaagaccgtgagtccagagacacgcatcattggagttgagccacttggggcagcttccatgagtgaggcgatgttccgcaaacaggttgtgacgttggatgatattgataaattcgtggatggtgcagcggtgaaacgggttggcgatctcacctttgatatctgcaatagtatacttgatgacattgtgaaagtgccagaaggcaaagcctgcacaactattctggaactctataatgaaaatgcgatcgttgtcgagcctgccggttccttggctgttgcggcgcttgagcaatatcgtgagcaaatcgtgggcaagacggtggtctgtgttattagtggcgggaacaacgatatcgaccggatgcaggagatcaaggaacgttccctgatctatgaaggtctgaagtattatttcatggttaatttcccgcagcgtgcaggagctttacgtgaattcctggaggaagttctagggaaaaatgatgatatcacccggtttgaatatacgaaaaagcatgataaggaaaatggccctgccttggtgggcatcgagctgatgtacaaggaagattaccacccgctcattgaacgcatgaaccgcaaaggtatcgcctataccgaactgaacaaaaatctaaatctgttcaacatgttaatctgatgaaacataccagtatgccgtcagatcaccacgaaacatctcctctgatcagacctgcacgcatagaagatgctgatcaggttattcctttgctgtatcaggcgataggagacattgcatacacgcttgcgggtgaggcggatcatgagaaggcgatgcagattttgcaggagttctatgtacaggaaaacaaccggattagctatcgtcatgtgacagtgatggagcgggatgggctgattgcggggattctggtagcctatgatggcggagaagcagatcgtctggaccagccgattctggatcgacctggacgaagccgggatgagaagtatgcattggtcaaagagacccgtccgggggagtattatctggatactctctcggtaagtgaagcttatcaggggcagggcatcggccgggcactgatggctgcttttgagcagcagggcagagatctgggtcactcgcaggtatccttgattgtagaacgggacaacggccgtgcgctaatgctgtacgaacggcagggatatgtcaaagacgatgtgattgtcatcgcaggacatgagtataatcatatggtcaaaccgattcaatagtgcagggagctgacgggttgagtcagttttgactatagaagcaaaaagaaaccgcgacaggagcaaaccctgtcgcggtttttgttgtggttatctgttgggatttagcctgaattcgaacaggatattaaccgtgggagcggattaactcaataattcgcgtagtcgctgaccggcacattctgctctagccatttctcgacagcagcggttttctcgaatttggcttcggttacgatatccatgaacttttcgagtttggtcaggaaggcactgtcttcggatgagttacgttgtaagacagctttgtaacctttctgggcattggctgtcattttgttcgtttcataatcaaataaaggcgtattattcaggccataaaacgtatacaaggtatagttattcatcaggttcttcacctgttgtacccgattggacttcggatattcgttcaggaaacgctcctgattcaaagcgcgattgagtatctcctgatagccaatgaccagtgcaccatcatcggcggcaaggttgctggtttcaactgccataatattaatgtattgtttgatgtctggtttcacgtacgagatatatttctgaaaagccatataattcatgatcggatagagggaaccttccagcataaccaggcgataaccgctatcccgtgcttgctggagcagtgcacgaagactggtgtcgttggtgcggctcattagttgggtgaagctatcattccacttgtaggctttgatcatcttgtcctgaacgttaggaacgagcaggcggtccgtcatggctgttaacgccttgttgcgggcattctccagttgtaagaccatcagagttgcatgataagtggtgacttgattgatatgagattcgagataagtatccgcggcaggcaagccgttctttttgtagagcatggactgaaatgttttatatatcgttgttgaactggcagtcgtgactttggtatctgtactggaagaagcggcagcagcgactccggataagggagcgacagccgtttggagcagcatgaggatggcggtggctgtaatgaaggtgcgcatgcctttacgtttggcagattggaacgatgatgtcatagatatgaacctcccgtagttgagaaaatgataggtgctgttcactagtcactatacattaacctaattgatgcaggatgtggttgcggaatggtgacaaattcttctgttatttttaacttttggagggtggaagatagagggagaattctgagaaaatattttttgtacaactggaaacttttgagctgatcggaacgtcttagttgtgcataggtaaatacaggaattcatgaaaagaacagcgaatctatttcgatgttaactaaatgcgagaatggggatatgggatatgaggaaagcgggaggaaaacaagtgaagaaggtaatgtcagcgctggctgtatcagccatgctgatgtccgcacttccaacgtcggttatggatgcagccgcgaggatcagtatatatattaatgatgcagagttatcatctgctcaggcacctgtcatgaaaggtggacgcgtactggttccgctgcggtcgatttttgaaggattggatgcgaaggtacagtacacgaacagaaccaaaacgattgttgcaacgcgcgacgatcaggaagttactttgacacttggttccaaaacggcatacatcaacggggaagcgatatcgttggatgtacctgcaaacacgattaagggcaacacgatggttccaattcgttttgtcagtgaagcttttggagagaaagtattctggaactcacgcaatcagcgtgtagatatcaagacaacggccacacctccagtggatgagacacaatatgctgcatggaacatctatggttcggtatccggaagtaacggagatggtcgtgacttgaccgtgagcttcacacgtccaacttcagagaaggcggtatctgcttaccggattatgctggtaaaaactcgcgatgtgaatagcttcacggagtcctcagcaactgccgtaccttctgcgaactacacatctgttacaccaaatggcagcaacccgaaactgacacttaatgcacagacacgtgacgtaaacggggatttgcttaacagcaatgaaacgtatcgcctgtatgtactgactgttggtaacagcagcaataattataaaaatgcattgaactggtcttcccaagccttgaagctcaataatgtgaaatccacggtacaggcagttacaagtctgcgtgccgcagatattagtgactatggcgatggtcgcgatctggagattaacttcacgcagccgagcacaacatcgaacattacgtattatcgtgcttttgttgttaaagcgaaggattcttctgcgttcaatctggctgcagcgaacaaagtgtccagtgccaactcaacgatcatatacaaaggaaacagtaccgcagtgaaaagccagctgacttcttcgacacgggatacgtccggcgaattgatcaaaagcggtacagcatatgtagtttacatcttgtcggtaagcactaatacaacaacagacagcaagctgtccgcagcaacatcttcacttacgctgtccgtgaacacagcaacctctccagtaattacgcaggtgaaggataactcggattatggagatggtcgtgatattcaggtgagcttcaaccgttcatcagatgagtccaaggtggcgaattatcgcgtctttgtggtgcgcaactcggttgccagcagctttaatctgacaacggcgagtaacctgtcctccagtctgtactatacggtgaataaaacaggtaacaacattacaacgactttgccttcatccatgaaggacacaagtggttataacgtaacgaatctgcaagattatcgcatctttgtgatggcggtgggcaatcagcaaaatggatacaccaatgcgctgtcagcttcctccacagctctgagactgacaacgaccggtaacgcgggagttattagcaacctgtctgttgcggatattagtgactacggtgatgggcgtgatctgcgggtttctttcaacaaagctgcggatgaatccagaatctctgcctaccgagtatatgtagttcgttccgctaatgtgggcagcttcacgctaagcgcagctaatgcgtcaaacaactatacgcaggtgaacaaaacgggtggtaacctgtccgttacgcttccaaactatgcggtagataccaatggttataccattagcaataatgttgcttatcgggtattcgttctgtcggtgaacaacaacggaaactccagtcaaaatgctttgtctggttactcttcccagattacattgtcggcaaacgcggctgtaacagctccgagcaatgtggttgcaactgatattggggatactggagatggacgtgatctgcgtgtgacgttcactaaatccgcagatgagacaaatgtgaatcattatcgggtgtttgtagtgaaaaatgcaaatgcaggcagcttcaatctgaacgtagccaatacagtgaatagctcgaattatacgtatgtaagtagaactggaagcaaccagacgattactttgtctaatggttcgagatcagtggatggtgacttgatccgtaatgatgtaggctatcgagtgtacgtgatggctgttaataataacacgtctttagtgaatgcaatatcgtcagcctctggtatagtgacactgacttcaaattccgctgtagcagtggcgagtaatgtgaatgcaaccgttaaagatcaaggacagtctggaacgccttcggatgtaacaataaccttcaataaggcaactaacgagaccaatatctccaattatcgtatcctgattgtgcctgctaaccaagtgagtggattcaatacaagttctgctcttggaattaattcttttattgaaattaacaaaaacaatgcaggcagtccggtagtactaaacggtggacatcgagatattaatggtagtgcccttgtagctggacagaaatacagagtgtttgtcttgtccgtttcggacagtacatcacgtgcttccaatctgtcccttgcttccaatgagtttaatatctttacacaagcaaatgtggttcaaactgctactattacaggccttcaaaatacaagtactgtaaccgaagcgagttataagcttacctttactaaaccaactgctgaaacggggatttctgcataccgaatctttattgttaaaggaacagataatttggatattactacagcaagctctaacactagctacccaattggaaatcctgcagcggttgaagttactttaacgaaatcagctatagattcaactggagccaatctggtggaaggaggcgagtacaaggtgtatattctttcagttgctgcaaatacaacaacgaataaacatacactttcaggcccatcggatacattcaagcttgaaaaagctcagcctacgcctacacaggaacagacgtctactaccaatccaccagcctcaagtgaggggtaaacacctccataggggtgaatgtaaaaatttacactgaaacaaactcgaacaccctttccatccggaaagggtgttttcattatgtatgaacgacaatcgtctggcgtgaatttcaaactcgctttttgaaaatcttgtcgtcaaaaaggttcctaagaccattgttacatcgggaacaaataatggataataaagggaagttggctatatagattgaactaaatatttacatgaaacggccagtgtaaatatctttagttcactttatgtagaagcctatgagccgaaaggaatgatggaatgcttgcatttcgtttgacgggcctgccggattcccggttgccgctgtacctgtattgtgtgggcacgcaggaagagaaagttctgcatagaccggatggatttccggtgtatcagttgtttttgtcacgcggtggtgaagggcagttcaagataacgggaaaagggacatggacgataggcgcagggcagttattcatcgtggaacccgaggttgcgcatgactatgtgcctcattccaaatccaaaggggaactgggttatatcggtattggcggtacatcggctggatcggtactacaatccgcgggtttgcttcagaacgaaccgtgccatatctccggttttgaagtcatctggtcacgcatgaccaatctctggcacgcgctggatcaaggagcaacggagatgtggaacacatcaaccctgatctaccagctcattttggatctagcacaatcgaaaattccatctgatgttgctagcgtaggtattggatcatccagggcacaggatggcactgtaaaacactctaatcgggagtccgatccgagcaaggatgcactcatccgagcagtagcattgatgcatacgcactaccaggatgacctgttattgaagcacatcgctgacgcagtgggttattcggtgcagcatctcaaccgactatttcaccagcattatggcgtgacagggcatcaatatatgcaacgattacgtttgcagaaggcttcggactggatggacaagcatccacgagcaagtgtacgagaggcggcagagaccgtagggatggaagtgaactattttatccggatgttcaagcgggagtttggagagacaccgggcaaaggaattaaacatcggaaccagctccaaatggaaaaagacctcacgagttcgtgaagtcccttaatcgattatataacgtgttatgctgttttcttttgtccaaataaaggccttaccgttgcaagtcccacaactccgatcactgcactcacccacggagctagtgcaaataccggaagtttatcacgtagtggataccctacaaacagcacaaggaccacgatgacgatgtaaatgatgattcccttaaggttaaccttaggtacggtgttcttgtccgctccttcatcgtccggtcgctcagcaaggcggcgaagcatctccaccaatgcgataccgccaactgccgcaacgatcagagagaacagactgatgtgttggaacggctccgtatctccgccagtccaacccacgaacaatcccacacatccttgaatcaacatgacaaaagacaaagccgcccaagcgatcatggcataccactttggtgtccgtttcacaggctctggattctcagttggctgtggttctacagcgttggcattctttttcgatgaagctgttgaactattatcacgggttgggctggatttacccacctcaacggcagccgtcttctccggtgctgtatttgtaatcccgagctgtgcatggatgtcttgttccagatcaggtccgtataactcgcgagcgggtttgttatcccgctgagcctgtacgatcgcttttcctgcggagagtatccactcttcctgtgttctctcgtccgctggcgcatgacgcgcaattgtgctgatctcgtcatacaatttcacatgttcaggtgtcattcgactcatctcagttatttgccgattctgtatttctttaagcttcttataggaaatccccaatgattgctccccctgtctacacacgttctgatcttccaattgactgaagaccctgacggtattttagtatactggaagggctctcgtttcgcaaagtcattccttataaaaaagctgcttatggtggacccatatccatacacaggccagtataacacaggtgcataacagcaccagtttaccgtgatgttgaatccattccagtagatgttccatgaattcattcctttcggcagaaggattccgaggcatatgctgcctatgtttgttcgtttattttcccccgttcatgtgaaaaaataccctcaagcctcccagatctaacgattgtgtgaagtatgcataaagagcagccgattccatcacaatagtagcatttccaacagaaatccaagattggagtgtgcttgttatggataaacaaacagaattgacccggaagctgctactgaacagcaactcccgtggagtcgtggacgaggttgtatcctttgaggagaatctggaggatacggagtatgcagaagaactgacagatggcaatttgaagggaagaagtttctgggacaatactgattcgggtcatgagcatgagtggaatggacgggtggagacccacgagatgttccgtagaagctacgaataacgatcctgcaacacttggtttgaattccaaatgatatctgggccagctgtcatcagcgtggctcatttttttgcgcttattatccgataaaatgtagattggtagtcgacgtagaaagggttcttacttacgttgacttgaaggttacgggatgataatatatgaataacatcttaatacacactaaacttatcggattatatatatttaataaataaagctcaacaggctagcatggaaaggggaaatcggtatggaacgtcagatcagtatccgtcatgggcaggaagaattaacagccacgattcattatccggtcgtgaaagatatcaaggaggggaagagtcagcaacgcgtacctctggcagtcatctgtcacggctttgttggtagtcggatcggcgtggaccgtttgtttgtaaagactgcacgggagctggctgaagacggttatctggtcctgcgtttcgattatatcggttgcggagagagcagtggggagtatggagcggagggactggagtccatggtactgcagacccgttcggtgctggattacgcggtgaattgcagtgatgtagatcctacgcgtgttacgctgattggtcatagtctgggtggtgccgttgcattactaactgctgtacgtgacaaacgtgtcaaaaacctggttatgtggtcctccgtgggttatccattcaatgatatcgtgaagattacgggacgggaagtatacgatgaaggcgtgaaactgggtgcggctgattatctcggatacaaattcacaccaacgttcttcgagtctcttgctgaacaacagccattccaggaagcagttaagtttagcggagatgtactcgtcgtacatggcacgtcagatgagattattcctgtagactacgcattcctgtatcaaaaggtattctggatgcgccaagagggccgctgtgacaaggagatcatcttccagggcgatcacaccttctcttcaggtaaagagcgggaacagctaattacgcgtaccagagagtggcttggcgaacgtcagaagatcgagcaggattggcaacactggatgatataagtggcaggattacaactgtttggggatgtcagcttggaaaagcgccttcttaagggtaaaatagaggagtaagcattctatccgtgtctggaggttggcagcaatgacattacccgcacttttcattgcgcatggttctcccgctctggcggtggagagcaatgactacactcacttcttgaaccagcttggagacaggctgccggctccgaaagccattgtcgtatttacggcgcattgggattgtcctaagccgtccgtgacgatggatgatacacatcagaccttgcatgatttttacggatttccttctacgatgtatacgatggaataccctgcatctgggcagccagatttagcgaacgagatatgtgctttgttcacccgcagcaatctggcacatcagccgattcgaggccgaggactggatcatggcgtatgggtaccgttgctccatatgtatcccgaggctaacatacctgtgattgctgtatctgtagactcgctgcgtacgccgcaggaacagtatgatattggccgaatgctggaacagctacgtcatgatgatgtgttaatcattggcagcggtggaacggttcacaatttgcgattgctgggcaatacggatgaaccgcaagagtgggcggttgaatttgataactggattggggagcgcttgcagcagtggaacacaagagaactgtttcaatatgagaaaaaagcccctcatgcacgtacggcggttccgtcgtatggtacagaacacattgcacctttgttctacgccatgggtacagcggatatgtcccgatcagcgaagcgtctattccagtcttacccttatggaacgctcagtttaaactgctggcagtttggagacggcgtgtaacttggaacagacaacagcctgattatggtgcttgaagccagtttcgtacggataacataacgtgtattaatgcatacaattacaatatataaacaaaagaaggttactgtacacccttgatgggctacagtaaccttttttcaatacaaagacttattcatgcttattcatgcaatagatctttatttgcggatttcgaacaattcacagtctgtacgcgaatgataagcgagctcactgacactggattgtaccactacggtgttgctgtcaaaacggataatgatgccaccggagtcaatctggtgattatctttaaaaactcgaaccttatacttcatattcatggcttcctggaagtccgcatcggtctcgagacgtcgctgggtcggcatatcgtgtactcctttgaagttcaactttatttcatcataatacgattttctgtggatgggcaagtcagtcaggcattcaggctgattttgaaaagtaaaaagccctgctctccagggggattgggagcagggccgagaattctatgaatgattgcttaagctgttttttgagtagggctaatcgttggtgtgtctttaggaagatttcctttgttgttacgagtgaacaatccgcgaaggtaaggcagtacccagtgatccagaccgattttacctgcatttgcaccagcaacaacaaggaagatttccattacaaccagttgagcattcgtgcttactgttcccgagaagaggaacgcgaagttcatgaccatagccatcagtgctgctagtgtagtgaagcaaccgaggatgagacccaaacctacaaggaattcacccaatgggataacgaagtcgaacagtcctgcgtttggtactgcgaatttctcaaggaacgttgcccaccatgcttgaactgctggatgatcacctgttgctttttctaccgcaccggccaagaacccgccagcttggaatccgccagtcaatttgctccatccgtgagtcatccaatcataaccgatatacacccgaagtactgtcaaaatccacattgctactttgttttctctaagccattggtttgtgctgaacatatgaaccactccttcatggaatctagtgtgtgttgtttttgtttttctaagtgatcacctttgatgtctttattgtatagttcaaaagttgttttgtttgtgattaaaatcacaatctagttcaaattttaagtaaggtttgagaagttcacatttaggacatatttttctcgcaaatcgctgtttcaaatgtgaatttcaagctgtatcaaggccttctaggcgcagacaaatcggatggggtgtgattaaatggaaagaaatacgtgaaatggttgcccacatgagacatatatcacaacttagaaccaggccatatcgttcaggaggtcctatattgaagctttttaaatggaacaaagcagcatcggttgcatctctgtttattctctcattaagtcttgttgcctgccaaaaccaggaggtggcgcagatgccagttcagccagaaccgacacctgcacctgtacaagaagaacacgtggaggaaaccaacacgtctctctatacagcacctctgacgggtctgcctgtagatgaagcgattacgcgtcgaccactcgccgtaatgattaataatgcacccgcagctcggccccaatcgggtctaagttcagccgatatcattcttgaagttctcgctgagggaggcattacccgtttcatagccatcttccagagtggaggcggtgctgagacggttggacccgttcgcagtatacgtccatatctaattgagctcggcgagagttatgatggggtacttgttcacgccggaggcagtccggaggcgtattccattttgcaaaggcagcagaaacagcatatggatgaaatctcgaatggtggaccttacttctggcgttcctcggatcgtaaagccccacataatctgtatacttcagcggacaagctgagagaagggtcagatatcaagggttacagccatgatttcaagtcgccagtatacaattataacgaagaaggcgcgacatccgcaggagaggcagtaaagcaattcgatatccattatttattggatagttaccgggtgacgtatgattatgatgaagttagcggacgatatatgagaatggtgaatggcaaggcagatcaggatctggataatgggactcaacttggtgcagcgaacatcattgtggcaggtgcagatcacaaggtgctcgataatgtaggtcggttgtccgttaatttggaacagggcggggaagccatgctttttcagaagggcaagatgattcgtgggcagtgggtgaagaagcagggggatattatacggtttgttcaaggtggcagtgaagttgctcttgtaccgggtaaaacctttatcagcattgttcccaatcaaccggaattttccagtcatgtgaagctggctgcgcagcaataaaaggatgtaatgaaagaaaacaatgaaacatgtattcattttgttgtcgaaaaggcattatatttgtccttagcgtgaaaagtagaatcgtgtcgattttgaattttgatgtcgaattgtaaacgcagtgtaaaatcttgacttgaatttaccattattccaaataattaagattcatttcagattaatgtgataagaatataaaaaaggatcacaccttttgtacaaaccatgaaacaaatatgataagatatcaaaggttgtcatttcatgtttcatcggttgtcggcaatttttctcgtaaaggggatagagctatgaagcttaagaagaagaaggatatattttttgagacactggagaatatggcagatacggttgttcaagcggcagattatttctcccagcatgtttccaaccttcaggatgtgactctttttgctaatgaaatgaagaagtacgagtcgaaatgtgatgattacgtgcatacgatcattacagaactcaacaaaacatttatcacaccgatcgaacgcgatgatattatggagctgacaacaacacttgatgacgtattggacggactcgaagcaacggcttcccgtttctatatgtaccaactgacagatccagatgatgagttcgtcatacagtttgctgaaattttgcgccaatcggcttacgaaattcagaaggcgatccatctgctgtcccagaaaaaattgctcgcgatccgtgagtataccattcgtttgaatgatctggaaaaccaaggcgacgaagtgctgcgcatgtgtatcaaacatctcttcgctaccgtgtctgatccgattgaactgatcaagcgtaaggaaatttacgaacgtcttgagacaacaacggatgcttgtgaagacgtggcgaacgtgcttgaatccatcattatgcgtaattcttaaggagccagagaataatggaaacaacgatttgggtattgggtatagtcgtcttccttgcactggcgtttgacttcatcaacggttttcacgacacggccaatgccattgcgacttcggtctcaacccgagcactgacgccgcgtcgagctattcttatggcagcggtgatgaactttgtcggtgcgatgatgttcacaggtgttgcgaagacgattggggggagtgtgaccgaccccaccacgctggataacgggatagaggtcgtcatagtcaccttgatatcagcgattatctggaacctggttacatggtggtttggtattccgtcttcttcctcacatgcacttattggagcccttgcaggtgccgtactcgttggcgcaggatctgataaagtgaaatggagcggattcattgatatcgtcggaggtttgctattatcacctctgatcgcatttgccatcggttatgtggtcatgacgattctcaaatatattttcgccaaacgcagtccgcataacgtgaacaaaggtttccgtacggtacagattttcacggcagcactgcaagcattcacgcatggtacgaatgatgcacagaaagcgatgggtattattacgtttgctttggttgcagcaggtgtgcaggataatctggatgttccgctgtgggttaaaatttcagcggcaacagcgatggctctgggtacgtccatcggtggttggaaaatcatcaaaacgatgggtaccaaaatctttaaaattgaaccgattaatggttttgccgcggatatttcagctgcttccgttattttcacagcaacgttgcttcaccttccagttagtacaacgcacgcgatcacctcagctattctgggtgtgggttccgcgaaacgtttctctgctgtgaaatggggacttgctggacgtatcattattacgtggttcattacgattccgattactgcgggactggcaggattgctctactggattattttctaaaaagagaagttatcccgaacgaattcggggttaccagaccatctgttcataactgtgtgaatatcgggatatgtggacaattatacaaccaaaatcaagagacgcctgtgcatgaacgtgtggacaggctggatatgtggatagccatccgtggaatgataaaccaaaagaagatattcctgtggatacagggaactgtggatagggaaatgagagaagccaacagggttggctttttttgttgtcgagtttgaatgcgtctgtggatattttggacacgtgggagacgtacctatggttaaagttgtacaatgacgtaaagatacaggacaaggacgtggtctaatttatgattcgtacactcgccattacacgagaacatcaagtctccgttaacgtaccacttacacagctggatctgaacgattacgcctgggtatgggccgattttaaccagccaacggaagaggaaagtcgtttgctggatacatattttcattttcaccctttagctattgaggactgtctgcatgtattgcagcggccaaagcttgattattatgataatctgcagtttcttgtactacatgcactgaacccgtccacactggaagccgaggaggttgacttgtttctcggatcaaacttcctagtgtcttttcatcatggagttttggaggaagtagatgaagcgtgggaacgcttgttgcaccatgcacatgaacgaaccatctgggcacgaggtccggtggctgcagcctatacggtgatggacaagctggtcgatcattattttccgtctctatttgcgattgaggatgaactggccgaactggagaaccggggtggacaggagtcagttgaagacttgatgaaccaggtgtttgatctgcggactcgattgctgaagctaagacgaacggtagtaccgatgcgggatctgctctatcgggtggtcaattcccagcatgtacaacgaacaggcgaacatacggcttattttaccgatatctatgaccatttattgaagctgacggatatgattgaagccgatcgggagatgaccgctgacctgcgcgatagttatatttccctgaactccaaccggatgaatcagatcatgaagacactcacggtgattacgactgtatttatgccgcttacactgatcgcgggtatttatggcatgaactttgcctatatgcctgagcttcaatggaagtttgggtatggtgcggtgctactgttgatgtttgtgcttggcggaagcatggtcgcctggtttgtaaaacggggctggtttaagtgagaaccagtgtaatcagatgttagtaacaaaaacttgtaataacgtgtatccacaggtaaaatataacgatatgtgaatagattctggatgaattatccatacatatcattgtggaaggatgggatacgatgagattggcagaggctcttgtactgcgtgcagatgagcagaagaagatagctcagctcaagcaacgtctggaacgcgtagttaaagttcaggaaggtgaacagccagcagaggacccacagttgcttatgattgacctggagaatacgatccggagcctgacggtattggttaagaaaattaataagaccaatgcacagactgacttcacagctggagttacgcttgctgatgcccttgcagagcgggatggaatcatgcaagaaagagcatcgtttaacgaggttttgcagcatgcgtccattcgccaggatcggtacagtcgttctgaagtgaagtatgagcgaaccgtgaacatagcagatattcaacaaaaagtggatagcctttcgaaatcctaccgggaactggattttaaaattcaggagaagaactggaccatagacttaatcgaggaataaaactgcgtcggtaaccctatccaaatgaagcgagcataacccaccaacgggaagttggaaacctggtagacgctgggccatgtctaacccatatcatcatttagcccaatattgttacaagaatgcgcagcatggatgtatcgtgtatctttctaattgttacgaccatatgcaggtctttggatagcggtgagggtgggtaaggggaattgcagtttgaactacatatgaagaaggccactgggccatgatctcgggcagtaataaatgtcgggagatgatgtttgccaggtggcctttctgattcttctattagaagttttgaaaaaatgtatccacatgtgaataactattccgcttcaacaagctgtgtataacttatgatgacttccttttactccatttcaagaacaaaagaagttgtagctgcttctttgccattcacaagaatggtaagcgtatgcagaccggcataatattttctcgttgtgatgactttgaaggattgtttggtggctaccttggttctgcctgtcgggtacattttatcggagcatttgaaccgtttgggggcctgcttgccgtttgccttcatataacccatctcatattcaattcgcagcatctgggactcgccgctctcattaacgacatcgaacgaaaaatggagatcctcgccaatgctaatcgtatcctggacaagctgaagctgctcaatgtgaatcgaatcctgctcgttataaccaaaaagactcagtgctttgctatgtcctttcttcagtaatgacctgctggcatgccggacaatccagtctgtgtgtgcatgttgtccgtaccaggtcgtggccagatccataaccagttcagggtggtccttggagatgtcattcagatgattggcgacacttttgcgaacatagagggactcgtcctgtttcaatgcatgcagaatcggaagtacaggtgttggatcagtgataaagttctggagtttcgcaccccatggcaaacgtggccggctgccctcactggcaagtctgcggatatgctcgttgttgctctctgcccacgccatcatatgtttcatcgtttggattggataatgttcaataaacgggcgtaccgcgaactccgagctggaataaggtgtgaagagggtcagatacttcatggataactcgtaatcctctgggtcaagtccgttcacttcgataaaatccggtacaaacagatattcaacgcctctcatcgtcggggcggcttgttcgataatatgtaatgcttcctcataattgtccggcagtacctgggtcaaagccagtgtgattctgcgaatgcgcgctttaaattccaacttttcccagccttcagcgaaaaccaattcatgaaattgctgtgtatccagcttagggtagaattgacgcatctgttcgccggtccgatcgattaatgcgggagtgtatttgtctttgataagttccatggtccgcctcctttagttactatccagtatacctcaaattacagaaataagaacgtaagttcctgaaatttatttgtatacggatggacggtgttcaggcacccgccttctgtaagggggtgcctgaatcttcttaacctttgcgacttttgggacggggcttcgtggaattggatttgcgacgggttggagtcgtattacggcgacgtggaacattcgttgctttgttccgacgtttgtttttgcgtttgcgggacggcttatattcttcatagtctgcatcggccgcgctgctatccgtttttccttttccaaaaggcagaatgcccataacgagtttcatcatcggagccatctgctggataccaccgacgaccttttgcattttgcctattccagtcatgattccatcaataccgccgaagcggtcgatcattccttttaactcaccgatgttggctaatgaaaagccggaactgccagtggcaggcgccggtaccggagctgggggaagaacctgagctgcacctccataaaagttcccgccagccacaccttgcccatagggtacgactgcagaagcttcgacttcaccaaagcccgggtaatggggctctactccaggatacatcggttgaatctgagtttcatttaaagacctcggaaccacaccgggcggcatataggcagaagtatgtgcctgccgatgagcatgagaagacggacgctgccctggtgctggctggcggtgataataatgctgtggcatgaacaatcacgttccttctattggatttcggaattgcgttccatgagttgcatgacagatgtacatcatagacccttgtggaactcccttttgttatactgtatgtcattcgcggagagacggcgtaggcgggtatcccggaaaacgggatatttgcggatttgggcgcatgtaagatggcaggttcacgaagagtaaaatgaagtttagacacaaaattgtaacatttaggaggattgaaatcctacataagtaatcggatatatacaggtgaaaactgggaaaaagcgcggaaatttcgcccgatgtacacgaggggaggacaatagtaccttttgtaagcggtaacatgtatttttattctgtagtgcgtgaaatcggtaacgcttgaaataccaactcagggtgagtacaatgtaggtacacagtaaccgctaggggatgatgatgaaatgcagctgaaaaagctaaatgataaaagcattgaacaactattcgaggctattttgacgctaaaagatattgaagagtgttatgttttctttgatgacctctgcacagttaacgagatccaatccatgtcccagcggctggaagtggctcgtatgttgggtaaaggcaatacgtataaccagattgaagcggagacaggtgcgagtacagctacaatttcacgtgtgaaacgctgcctgaattacggtaatgatggttataaaatgacgctggaacgcctgggacgctaacatgaagaagccgggtgtactcatcatcagtcacggttcacaggagcagacctgggtggaatccgtcgatgacgcgatctcccggttgaatctgcctgttccattaccggttgaagccggttttcttgaacttgtggaaggacgcctgatccaggacggtatcgaccgactggaagcacaaggcgtaaccgatattctggtcgtacctctatttgtttcgtccggcagtacacatgtggatgaaattgaatatgccattggtgcaaaggaaacacctgatcgcgaaacggatctggaaccgttcgatgtgaaggctcgggttcacttcggttatccggtggataacgatccggatattgccgtgatggtgtgggacaaagtccgagtactgtcgcagcaaccggaggaagaaacgattctgctggttggccatgggagtattcatggtggttttcgcgagcgttgggaagccggaatttcttcccttgcagagcgtgtgcaggaagttagtgatgtagcccatacggattatgcattgctgaatccggagagtgtgtacgacaaagtgaagtactggagcgaagagcgggggaaccgagtcattgtggcgccgctgtttttgagtgccggttatttcacgaggaaggttattccggatcggctgcaggaactgaactatgtgtacagcggtgagacactgttgccacatccattgcttgggcagtggctggatcgccagatcgagattttgctggagagatgtaatgaggttaaagcttcttcttgaaatgattgctttggtataggtgtgtaatcacatcgctcgcagtaatgtcgcatcaattgatttgaactccatagcttcataaacaatcaaaccacgtcgaaggacgtggtttttgtttgttgtagatcacttgaaagagattgggttatccattaatgggtgcgtgcaattgcagatgtagctccagtaaatttattaattggtcaacgatctcctcggccggataaggcatggaattcataatccaccactccaggaggcccacagcagcggaagcaagaaactgtgtggtgatctcttttttcataccttcctggatgccacaggcatccatctgttcctccactccctggaccaacaatgtcatcaacttactacggaacgctggaataccttttttagttagaagtgtggtataggtagaggcatgctgttccagataactgaaggttcggagcagcgcatccttggccgtaacgggtgttgtagtagggctttcgatcatacaggcatccaacaaccgctgcaaataggtctcaatgcattgatccaacaggtcgaacttgtcagcgtaatgcaaatagatggttcctcggtttacattagcccgatcagcaatatcgtttatcgtaatttgctcgaaatctcgttcttccagtaacccgacaaaagcttcgattatcgcctttcgtgtcttaagtactcgtctgtccatggcccctcctatgatggttttcaacaataaggaatcattcgttgattattcaacaaaaacggatattttaacgattgaagcacagtaggtgctttgttaatcttattttatcaacaaatgttcataaagcaacgaatattgataaaatatgaaatagagggataaccaatgaaaatattagtgtatggtgcaggtgttttgggcagtcaattggcacacgttctggtgcgcggtggcaatgatgttactgttctggctagagggaagcgggcagaagagctggagaaggatggaatcgtcatccggcatgtttttcaattcaaaacgacagttgatcaggttcgggtagccagaacgttggaagtggatgaccaatatgatctggtttttgttgtcatgaaatataacgattttccttcagtgttacctatcctggcagacaatcagagcagtaatattgtgattgtgggaaacaacgcagatgcacggagcatgcaaaactttttggaggaaaacagcagggtagcaaaacaggtcgcgtttggattccatgtgagtgcagggaagcgggaaaaggaacgcatgttatcggtcggtggaggcagcggacaaatggtaatcggcagtctggacggagagataggctttaaacctgtgctggatcaggctttccaacatgtgaaatacaagttaaatgttctgagcgatattgatgcctggctgaaaagccatatcatccccattctgatgcttaatgcggtgagttttaatgaggagcgtgagttgatcaagttggacgggaatagaaagcaaatccaacatatgattggggcgatggatgaaggctttagcgtacttgaggctatgggcataacgattataccggagattcagggcagattgattcgcaagcatcaacggatgttgtaccttctgttgaagatctatagcatgcttccggttcataagctggtcgcgggttcttttggagagattgaggcgttaaataatgcatttaccgattggaaaaagacaacaggcatcccgactccccattgggacgtgctgaaaagagattttactatccttaaatgaagtgttgctcattaacccaataccgactacaataaaaccaactaataaaatggggataaggagatatacagatgcgggaagtgcccatgcgctatgtgaaagcgaatcaggttggtattgtattgtttgttttgctctcgtttgtgttcaatcctctggtaattctaggcgtgctgtgggtcattcaggtggttgggctggcttccagtggcaagcttaatctgtttgtgcagattgggaaagttgtgttgactggtaaagggacagagacgcaggcggtggagctgcagcgattcaacaatattctggccgtgctcttcctgtctctggcactcatctcgttctcgcttggctgggtagccgcaggttatgtattctccgtcatgcttctcgcggctgcaagcgcggcgctgctgggttattgtgtaggctgcaccgtctacttctggtacaaacagctgcgtgcaggtagaaaaatcggattttgaggttggctgaagagcgatacgatgacagaataacttattcttcgagtaaggataaagacgagtcatgttccgaggagctttctggcaggaagcttttagctggacctatatggcgatcggaatacgatcgcattataatgaaatccccctcaagtgagctgccacttgaaggggatttttttatctgaaccaggccttatttaaattgttggtaaaattgttatcgttgaaaggcacgttggcgctaccgaagtttgtcgtgttgagtgcatttcgtgccgcagaagtcagatcgtcccatccgatcaaaggctgagttccacccacagcattagtaacgccaagctcatggttcagcggccaggtactattataggaaatcaacggatggttaccttgtgtattgttattgctcggtgtaactttggtaaactggccgtgaccggaatatgcgatagagaggattttggaattggcagctgccggattatcgacccacacgacgattccctcccaatcatgacgatggccgagtccagaggaaggggagtctttggggaaataccacgaatacatgatagcccacaccccattgtgccatgtggagcgggagtagatctgccctgtacttgagctacagttcccattcgatgacccggacgtattcaagccagcgctggtattgccctgttgatccactgcgggaaaaggcacacatccatgatagacttttagaaatggctgaaaacgcttggctgcttgttgcattacggtgactggtgagacttcctgaaatccgacaacctgatcatgattaatttctgctgcttcaacaacggtgacccaaggaatacatgccataagaaagaccaggagcattaacatgatttttttcatttacacttctccttcaagggtatgatgtggtgctaagttgagggtgcactaaaactatattggaaaaaggtttatgttatttatctttttatcttaagatttgtaaatttgtagcatatctatgtcataatcatatgaagatcatcgaaattgaagactaattcctgtccaagcgggcagaatggttgattaatgagactattttacataaaaggtagtggagaagattcaggatcggtgcgtgaggtttattgggtaatggatggattagtaggtacctatatgaaaaaatatacttatggattacaggctaggacatctttacatttgatgatatgataggagttaaaggctttggaatgagacggaattcctgatgcatagatataggtaagacgaaagattagagcaacattaacggaagttcattattgtgtaaaaaatatgcccttttgtggactgatgcaacgtaagaatatgaggtcgtttagactcatggataatgtggaataggtggcgtatgagatgaaaaaagctcgcttaatatataatccgacctcaggccgggaagaaatgaagaaacgtctggctgatattttgcagcgtttggatcaaggtggtattgaagcttcatgtcacgcaacaacgggtgaaggtgacgcaacccgggaagctgaactggcaattgaacgcggatatgacatgattattgctgctggtggcgatggcacgttgtatgaagtgattaacggtatggctgagcgggagaaccgtcctccgctgggtgtgtttcctttgggaacaacgaatgattttgcacgtgcactcggcattccgagacagtgggaagattacgtggatctggtcattaaccagcaacttcgtccgctcgatctgggcaaagcgaatgataaatattttatcaacattgccggtggcggatcattgactgaactgacctatgaagtaccgagtcgtctgaaaacgatgattgggcaactggcctattatatgaagggtattgagaaaatggcgagcctgtctccacaggagctgattattcgcgccgacggtcaggaagaaatccatgatgaattcatgttattcctcatcgccaataccaattcggtcgggggattcgagaagttggctccaggtgcaaccattgatgatggtctgttcgatgtgatcggtgtccgcaaatgtaatctggctgacatgatccgcctcgtaacgctcgcgctgcgtggggagcatctgaacgacaagaaagtggttcatttccagacgagtcatatggaagttacgtccccgggatatgtacaattgaacctcgatggagagttgggcggtacattgccagctacctttacgaatttgcgtcatcatctgatgttgtatcgttaaacttggcacttggcggagaatgtggtcgcttgcggaaagcgttaatgccgcagtggttgttgtatagcatcgcacaagttgtgaggagagttggattcagctctgccgtaaggcgtgatggaagtgcattttccagttgctgtgtacggtgggatcgcgtataatctcatgtggtcaccaaacgttgagctgatacaggacacattgtggtgattgagtgaacgtgaacagcgaacagtgaagtattgaacagtgaaagttaaaagtgctggtctagttcaatggtactgcgatgtggtacaccgtgctgaatgtaacagtttggtcgagtgccggctggctgctaacgaactcagaaagccttaatgtggcgaaatcgccgaatctgcgaatctaaggaatctcagcgtcgttattttggagaaaatgaccgaaaaaggtcggaaaacaccatcccaggatgatataacgtttctgaagttcattagaaattcggaacgttattttttgatgtaaataaggtgtgctaggttcgttagaattcggaacaaaatgaaaaagagatttctccctcgtctgcataggcagggtactatataagaagaaagaagtgaatgtacgttgtctaatacgaaccgcagcggtcgtggaaaaaaccgccggaattcggctgcctctcaggggcaagggaacgcttcagcgtcccgtcagccaagtcaatcatctcgtccatctacacgtcagcagggaaaagaggtgcggccacaaggcgcatctctttctgccgttcgtccaaagggaagaacgcgtgaatctgcaccaatcgaaggtctgcccgttagcaaaaatgaagagaccgtcatcgacatcattggcatgaaccatgacggtgagggtgtaggtcgtgcgaatggatacacgctctttgtgcagggtgcgcttccaggtgaaaccgtgcgtgtgcttgtgatgaaaaccaagaagcagtatggctacgccaagttactggagatcgtgaaagccagcccggatcgtgtgtccgcgccttgcccgatctacgatcagtgcggcggctgccagatccagcatatgagttatgccggacagcttgcgtggaaacgccagttggtgatcgataatttgcagcggattggcaagttgaacgtgatgatggaggatgcagagacgttggcatccaacgcccaggatgacacctcagttgatgaggctaagctggcggaacggttggaacatgatgcaaatcagacaactgaacctggacaagcatcttctgaagcacaaatgattggaagtaatcgcattcgtttgcggcttgaaggtgtcatgaacgaagaagatacagaacacgcgattcgcgtactgcctacgatgggtatggacgagccatggcgctatcggaataaggcacaggtgccgattggagcagccgagggtggtctggtaggtggtttttacgctaaaggaagccatcggatcatcgatatggagagctgcctcattcagcacgaacacaatgacgaagtggttgcaaaggttaaggagatcggcagccattttggaatcagtgcatataacgaagagacaggtcgtggcttgctgcgtcacgtggtagtgaagaaggcgttccgtacaggcgagatgatgcttgttctggtcaccaatggtcgagatattccgtacaaagacgaatggattggcagtatccgtgaagcgattccgcatgtagcgagtatctgccagaacgtgaacaagaaacagaccaacgtcatctttggcgatgagacccgcgtcctgtggggccgtgatgtaatttatgattatatcggtgatgtgcagtttgccatctcggctcgttcgttctatcaggtgaatccggtgcaaacggaagtactgtatgggaagacggtagagtacgcaggactgagcggcaaagagacggtaattgatgcctattgtggcatcggaacgatctctcttttcctagcgcaacatgcggatcaggtgtacggggtagagatcgtgcctgaagcgatcgaggatgcgcggagcaatgctctattgaatgagatgcgcaacgtcaagttcgaagttggtgcctctgaggacgtcatcccgcgctggaaagaacaaggcatcgaagctgacgtcatcgttgtcgacccaccacgaaaaggctgcgacccgcgtttgctcgataccatcctggagatgaagccggaacgcgtggtttacgtgagttgtaatccgagtacgctggcacgtgatcttcgtgtgttggaagatggcggctatcgcaccgtggaggtaacgccggtggatatgttcccgcatacggtgcatgtggaatcggtggcgatgttaaaatggaaggggcaggattaattcctacgcctctcgttgttccaacttccttatggattgaggacaggaaatatataatgtatggctttgattgaaccgtcgttaataacttcaattttttgaataagtctttgaagtgcctgcttaaagacttgttgaccttcaatttgaagttcggtgaagtgggataattactttatataggcacggagttgttcttccgtgtctttttttgtatctataataatgaagtaattactgattttgtacacaccctaaacctaatacagatagaggtggaatttcttgaactataggggcatagatctcatcaagtagaagcttcttatcatcacgcttgtagccaaatgtgggtagagaagccttgtagggcggttcgtgaaaatatcatcttcatgtggctcgccgctggccaacagccatactttcgtaccagtaacctctttctttccgaacggataacggatgaaagaggttactggaaaccgtgtttacccatgtgctagagttataactgatttcgattggacgtcaaagcgaggcaaacttcattaactcagctttggacgctgatacacgtgattctgtatcgtgttcatgagcgattccagtttgaagtcgggccgttctccttaaataattgacgttcgttcttgacagccccacagcatgcgttgaacatctccttggcatcaacgggctttttcaaaactgttgacaattggcatatatgtaattatattaaatatatcgggcgcttggtgctgtaaatctactagtgtaaacgctaccaagcaagactttacgcagtatagttcgatcccgtcgaggaagaaaatggagagttgattggggacttactcccagttttatatacactctgtccatttacgagtgacattcatcgtagttttgtagagcattttcagcaacgcttcattgcttgggaaaatgcttttttctttggctttgcgatgttgacgatggtaaccctcaattatttccgtcgttgtactcttcgcgtcaagctttttatgtcctgcatcgtgtcatactccgcctccagcatgaattgcagaatctctgcatacaactatgcaaacaactctttcagtgcaaattcaccttgtacatcgttatgaacttttttttcttcacaatactctcacttgcttatcacgtatactatcctcttaaatcagcctttctaaagattatctaacgggggaatatgatgtctaaatcaatagaatatatcttgagagatgaaatttttgctgagctggacatcgagtatccggaagaccacgatacccgtttgttggaccaagggatcgattcagtaggcttcatcaagcttattgttttagtggaatcgaagtttaacatctccatccctgatgaagatctgttatttgagaagttctccacggctggattaatccttaattatttgactgtgaaaacgctatgatgactatcattcagcgtctatttctggaggcctctgatcgccaagatcatattatccttgaagatctaaagcagcaatggacttacgcagaagtgatgacagaagcttacttgatttctttatatatccacaagaattttgagcttgagtccggaagccatcttgcattatacacaaataatgagcccttgttcatttttgcggcgctgggcattcaattctgcggttatgtgttagtaccggttccttattcggcgtccaatactgaaattgaaaatattttaaatgccagtgacgccaaattggttatcagcaaatctgcacagccagcgcatttaaattccgacattccttgggttaccgctcaggatttatcgcaagaaccaatgccttcgttcgaatcgatctcgttaaccaatcagtccgatcccaatcaatgtgcgattctccttcctacatcgggcacaaccggaaaatctaaaatcgttatgttatcccattggaatgtattaacgaatgcgttggcacatggcggaaaggtgggatatacagaacaagattcgtttcttgtaacgatgcccgttcatttcagttctacgattgtcacgcaattgatttcttgtatgttatatggaacccgaattaaacttatcagcttgcccttgctgccgcgcacagcgtttaaactgtttcagaataaggcggtcacgggattctcagcggtgcctacgcaattgatgcactttgtttccgatttccatcagacaaagaactggagtacctttgattccattgaatttattgtaattagcggtgcggcgattcccgcgaaattagtagaccatcttcagactgtatttcctcacgcggacattattcaaacctatggattgaccgaagcttctccgcgggtgaccatgatggaacggggagagcgctacttatcctgtggatcacccataaatgacgtttctatttgtcttgttgacgaagaagagaatgaggtagaaggagctgctatcggagaaatttgggtcaagggcccgaatgtgatgctcggttattacaaaaacccagagttaacgaacgctaccattgttgagggttggttaaagacaggagatttgggatattggaatgaatcagggtgtcttatactcacaggccgaaagaagaatatcattatatccggcggtatcaatatctatccggaagaaatcgaggaatttttgtacggcttgaaagaagtggaggaggtcatggttgttggtgtacacgatgatctgttaggcgaagtgcctatcgcatttctgaaagtttttaatgaatgcctggttgatatagatgcactgacacgacattgcaacttgcatttgtcaacgtataaagtgcctagacaatggaggattatcgataacattccaaaaacaaaaacaggaaaactggacagggcaagcacgaagcgcttattgctaaatgagatatactgattcgaaatccttaagctatttaaccagataacgaggggtgaacgagaggttgaagaattcaactcaaacgttaggcagaaaaatattgccggtcagttatccgatgattacaacatatacgcaacatgctcatctcttgtccatacttacccattacgagtgcgcacacccatggatatttagcaattatatccaattgtttattaacaaagattataaacaccattggggagatttttatttccctctgacttatgagctgcggccttcggatgcgtgcaaatggattactactcaaaagatacatagagatactgtaacaactaaatgggactctgttattcattttattgtagaaaatattaatgctaataactatgtccacaccatgatcaattatttctacgtgcccctaagcgatcgctacaataaacttcaattgcatcatgacatatttgtttacggctatgatttggatagagagatgttgtatgtttccgatttttttaagaacggggtgtatagtcaggctgagatatcatttaatgatttcaatcttgcgttcgacacaaatcatctaacaaccaatcatgattaccttagagaaatggtttatctgtatacattcaatgatcaatatcaggataaattcagtgcagataccctattgaattctataagaaattatttcactaagcaaacgccggagtattgggagatgttcaactacgggggtgacaaggataatcttgacttcggcatgcaaatatacacaactctattaaattatgcgaaagagacattggaacataaggttatgcttgatataagaccctttcatttactttatgatcataagaagataatgacgctaagactcaagtacttgtatgataatcggcatttaattgaattaaatcaagagcatatagatgaattcacagctattgaacttaaagcaaaaatccttgtgaatctagcgattaaatataatttgacaaaggatacgagtatttccgaaagtttacaaacgctgattacgaatatagaaaatgaagaatccatattccttgaacgatggctgaagaaggtagttattcagtaatgttgagggagcagatgatgtcagttgtggatatctcttcttgcacccgaatagaagccttagcgcgaagcccgtggtgatccgggcatatttatggaaggagtgatgccgggattataatcgttgggagacagcgtgttgagtaagccaaaccgttgctcttgtcttaaagattccgtttgctgacagcctattgctttcttgtctttcaacgatccgcattgcttcaagcacttttttccggcacaaccacagcgaatccactcacctcaagaatctctcctagtatttgacccgacatcttgtgattcatgcatagaaccatatctgttcgattgaattaatagtggtttcacaaaccttaagcaagggggaggatcataatattcattgtattaacaggagtcgcaggcttcatcggttccaaccttgccgagaggctgttgcgggaaggccataccgttatcggcgtcgataattttctgaccgggtctactgtcaacatagacaatctcttacggtcgccaaatttcaagtttatcgagcatgacgtcatttatccgctcgcaattgaaggccctgtcgattgggtgatgcattttgccagtcctgccagtccgcccaaatatctgtcctatccgatcgaaacgatgagggtcaacagcgaagggacgatgcatctgctgtatctggccaaagaaaagcaggctgcgttcttcttggcttcaacaagcgagatttacggtaaccccactgttcaccctcagccggaaagctactatggcaacgtgaattcggttggagcaagaagctgctacaacgaagcgaagcggtatgcagaggcgatcacctactggatgaacaggaaatacggtataccggtaagggtcattcggatcttcaatacattcggtccgaagatggatttacatgacggacgcgtgattaccaatttcattaatgaaatcatgtccaagcaaaaccttacgatttatggcgacggcagacagacgaggagctttcagtatatcgacgatttgctggaagggattgtgagactgctgagcaccacgtatgaacagccaatcaatttggggaatccggaggaagtcaccatacttgaagtcgcccaaatattgaaggagctaatgaagtccaacgcgcagttagagtttctcccgctgccggaagacgatccaaggagaaggaagccggatattaccatttcaaggacgattatggactgggaaccggcgatcagtttgcatgatgcactcgctagaacgatccattattaccagggtcaataatccattaaacgggaggtacctatgcaagaacagatcatagcgatgatatgcgaaatcaaggaagacgcccaactggcaaacagtttgaacgagcattcgaacatcatggaagacgggggattggactctttacagctaattacttttgtactacaggtggaagagcgtttcggtattgaaatcgattttgaacaattcgacttcaatcttatggagtcggtaacgaccttctgcaattatatctcggagctgcagaaaacagcgcctgtatgaacgatagacgcaagttcgagctcattatcgggacatttgacgcggaacgcttctggcgcgaccctaatctagccaaactgccgtcgtttcacgatcctgaaatggagaatatcgtgatggccatggatgagctgctcttcccattttgcgaggcgcaggataagctcattactcgttatcgaatgaacgtttgccataaagagtatttgcatgagatcggatttaaatttctttccaattcaaccgatctcgagagtcctgatgtaggaagcgtaggcagaaccgccaatatattcgacctgctcacatcagccgagcgaatgggtgacatggatctatacttgctggacgccgcccggttgtcgccctttgccgtcattccgggggtggatcgtactgcagcgcgttacgggctggaacaggattttccagctatcgaaacggttcagactgtcaattcgaagctgtattcaaccgaattgaaccgtcaccttgatcttcgatgtgacagccagacggtctattctcccgaagagctgctggcaaacggcttgactttgctgaatcaaggacccttcctgatcaaagatgagtttggggtatccgggaaagggaatttgctgatcgagtcggaagcgattttgcagcgagtcacatcctatgtcgccgatcagtgcagcaagggaaaaacggttcggtttattattgagccgttcctccgcaaggaattggatttttcttgccaattccacatcgattcggacggtacttaccgacatatctcagtgcagcagttggttaatcgcaatttcgcttaccaaggctcctatacagcagacgataggttgcttcatatgctgcaggaagcgaagtattttgatgtaatgaaacgggcggctcgcgagctttatcggtcgggttatcacggcgacgtatgcgtcgattctatgctgttgacagacggccgcatcgttccgattgttgaggtgaatgcaagaagatcgatgagtctgatcaagcattacgttgaccgctacctgaagaagcacgacacggccgggagcatgacgcatgcgactttacagtttgcatgcgatgtatcattcgatcaattgcttgaatcgctggaccgcgagggtgttctatataagcctgatcgaggattcggtattttaccgttaagcgcgaatacgctccttattaacaaagtcgtcagcgagtgcaaggggatccggaataagcaggtgaaaggcagattatattattcgttgatccagggggaatgggataacgaacgattgaccgctaaggttaaggaggtgctgtcgtcgttatccttcaagatcgcccgctgatgcagtccgaagcgcttgaagccatgaatggaggaagaaattttatgggtaagcggaaagtgacgattctatgctcgggtttcggtctgggtttctatattcccggtctgttagctgcaagtgatttcgagaaaagggatctcgcgacggaagtgctcgtgttcgaaagctatttggagcaagacaagatggaacatattgtagacagcagaaaggcttaccacaataatttcgcacttgccaatttatcggcccgaatgccgatggatatacgcaacagcattgattatgcccaggtcgagctattgttggaggcgtggaaagcggaagaccggtacgaattcatatcgttatccggacactggatctatattctggatttgtatagggagaagatgctgccgaatcaaattcatgtagacctgctctacgtcgattcagatctggccccgtcttggaagagcttgaagaagtttcattctcgctatgacgagtattattacaatgcttgtctctatgacactgacaagatggagattcgatgcgaaatcccagttcttcatcgtacgccactgcccttcgactcaaggaagcggcggcttgttgttcatggtggcggctgggggatgggcacttatcaaagtacaattccagagcttgccggccataactatgggcttgatatcgtagcttacgattggaaggaagcgaagcccgatcccgatcaccgatattggatgaatgatccggaatggtgtgcatgggtgaagagtgcgaacggcctgcacgagtttccgccatacatcgaaataacgggagaagacacgaagtcatacgccgctgaggttgatcatcattggttattcgatatcgcttcggaggcgatggctatcgtggccaagccgggagcgggcacattaatcgactcgcttgcatccgaaacccctcttattctgctggagccgttcggaagtcacgagcttagcaatttggaattgtgggaatcactggggttcggaatacgctacgagaagtggcgggagatggatttttccgtagaggtccttagggagatgcatcaagcgatcatgaacagacccggagaacggacgaattatgtggatcattattgtgcgagagtcgcgttaacgaaggggtaagatttcaatggcagaaggggttatgcgatgagtgtaaacaaattgagtgtcgtccaagataagacaaagacaagctatccgagatggatcgtcatgcagctgttggaggagtgtaatttacgatgcaagatgtgctatgagtggggactcgaagggccctacaaaagcaaaaaaacgttagcgcatctggatccggatctcattaaaaagatcatcgtcgagtgcagcccgggcaagccgtattacgatttcttcggcggcgagccgctgatgtacccttggctgagcgacattctcgccatgatcaatcattatggaagcatagcggacttccccacgaacggcacattgcttgagcaacatgccgagatgcttgtcgagactgctccaaataagatctggatgtcgctcgacggccctgaggaaatcaacgataagcagagaggcaaaggcgtattcaagaaagtaatcaaggggatcgagaagctttatgagcttcgggaaagcaagggcaagcaatttccgaaaatgggtgtatcctttatcattacgcccttgaactatatgtacgttgaggaatttttctttaagcatatcgacttgtcgatgttggaccatatcagcatggaagtgcagctctatgcaacggaagagcagtatgcccaatatgtggaggttcttagtgacaaattcgacgtgcatgaagctccttatgccaaggggatggtctggggggacaccagttcgttcagccagatcgatattccggaattgacgagacagctcaataatgttaaagcgtattgcttgaaaaaccgcatccatgtgatcacctatccgaagacgatagatgaacaaaatttgagtaactatttctcggggcaattccatcagatggctgataaacgaaatcggtgctcccttccatgggtttatgcggagattacggcaaggggcgacgtttcgccctgccatgccttctacgatttgaccttcggcaacgtgaacgaagagagtttgctggatatctggagtagtgacaagtacaaagattatcgcgcgtatatgaaaaaaaatatgcttccgatttgtacggcttgttcaaggtattatatctattgattcatgtgaatgacctaataagtttaagaagggtgtgttgatatgaatccaaaatcagagattaaacattccccaaaggatttgcaaatattgaaacgtactatcaagaatacggtggaaacaaagcggaacatggagaaaatagcgggttacgcgacaccgttgccagagtcggtcgggattaaactgacgaaccaatgcaacttgcgctgcaagcattgctatcaatggaacgacaccggctaccatcactttatgacaccggagcagcagcgggaacagctcgactacgggctgctggagaagctgatccttgagacggaaccagccaagtcgagactctatatctggggcggcgagccgctcgtatacagccatttcgaccgtttggccgatttgcttgaagcccatcctcgcgagacgacgatctgcacgaacgcgatgctgatcgagcgaaagctggacgccttgctgagaatctccgacaatctggagctactcattgcacttgatggattcgaagaagagaatgatgcgcttcgcggcaaaggggtattcaacaaggcgatagatgctattcggatgctagtcgagctgcgcaaggaaaaccgattcaggggcaaaattacgatccataccgtcgttaacgatgctatgaccaacaagctttacgatctgctggactttctggaggacgtcggtgtagatatggtcatggtctgcttcccgtggtacatctcggacgaatgcacgcagggaatggacgattactttgaccagaagttcgacttccttccggcgagcgagcacaagggcgaacgaagctggcacgcctttaactacaagctcgatccggagcgtatccctgctttgatgagcgagttggaccgggtgaataatcgggtctggaaaatgcgtttacgctaccagccgaatctggattatgaccagatcgaagatttcgtgctcggcaaagaggtgaggagtaaaggcacgatgaacaagaagtgcctggctctctcgaaccggatggatattacgcccgatggaacgattgttgcatgcaaattttttaaggagttcgagatcggcaaattaaatgaagcgtccgtacaggaattatggcacggcatgacctacagaaggataagggaaatgatggatgaacgactgacaccggcatgttccaagtgcagtgtcttgcatttgcacggtgtttaactattctacatgagcataaatgaggtgaaccagtgagcattatccaagtggaacgcttatccaaaagcttcaattactacgaaaaagaattggggttcaaaaaatcgctaaaaaatttagtgaagcggaagtcactgatcaaagaagcggttagcgagatatcacttgtaatcgagcaaggcgagatggtcgggttcttaggcccgaacggttccggcaaaacaactacgcttaagatgctgtccggcatcttgtatccgacaagcgggcaagcgacggtattaggctatgtcccttgggagcgaaaaaaagaattcaagatgcagttctcgatcgtgatggggcagaaatcgcagttgtggtgggatttaccggcgaacgaatcgttgtacctgaacaaatgcatttatgaggtcgaggataagccctacaaccttgtcctggatgagcttacggagatgcttgatgttaaagatctgctcaatattcaggtacgtaggctttcgctgggggaacggatgaagatggagctaattgcgtcgctcatccaccggcctaaggtgatttttctggatgagcctacaatcggacttgatctgatttcgcagaagcgcattcgggagttcctgaagtattataaccagcagacgaaagcaacggtcattctgacaagccactatatggcggatattgaggatttatgcaaacgaacaatcatcatcaatcaagggaagatcgtatacgacggcgatcttcggcgtgtgaacgagctgtttcatgcaaaaaagatcatcaagctgcaatttacggacgaagtgccgaggcaagcgctaagcgagtatggcgctatcatgcaacatgacggtatgaatgccgtcatggagatcgataagcatgaccttcagcggctttccaagatgatgctggaccggttcccgatcctcgatttcacagttgaagatatacctgtcgagcgaggcatcgaaagcttgtatcagaaagatggggtcagacatgaaagccttacagaagtataaaaggacgtacatccttgcgcttcagaatgcgatggagtatcggaccgatttctttatgagtatcatcagcggcggcttcatcattctcgtccaatgcttcctctggacggccgtgtttcgcagttcgccgcaagagattattaacggctatacttattcacagatcatcatttattccgtgttgtccggcgtcgtctccaagctggtttctgccggcttcgaaggggaaatcgcgaatgatatcaagacgggtggactgagcaaatttatcgctcagcccattcattatttcagctatcggatatgcaattttttcggtgggaaaacggttcagatcggggtcgtccttgtcttattcgtcatactgatgatcgtttttactcagatttgggggtttcagcttagaggggtgcagatcgttatgttcctggtcagcattctgttcggactgctcatcaacttcctgcttttttattcgattagtgctctcgcgttcatcattaccgaggtttggggcgtttatatcgcgttcaatcaaggcgtctatctgctaagtggtgccatctttccgcttaatattttcggagatacgtttgccagaatctccagctatttaccgtttcaatatgtcgtatttttcccggttaacatcatcaatgggagcatggctattcatgaaatcgtgcgcggactcctcttacaagctgtctgggtaattgtgcttatgatgatttcgaagttgtcgtgggattccgggatgaggaaatatgtagccgttggaggttagatctgtgagtatcagcttgacggagtttcggaagcatgtacgtatgttctttattttcgcaaagaacagcttggtcggttacatggaatacaaagcgaatttctactccggtttgatcatggagaccgtatttctgttttccaagctgatctatatcttgttcgttttccagctcgggatcgaaatcaatggcatttctcctgaccagatgttgatcttcacggggacctatacgattatgatcgcaatctatacaggactgtttatggataacttttatagattcgccggccatatccgcaacgggacgctggacttgtatatgacgaagccgctttcgctgcagttcatgatttcgttccggcacgttaacttcgcgtttccgatcccgaacctgatcgccgggatcacgatgatcgtactggcttggcggcgtcttgacatcgagccaagcttgatccacgtggccggatatatcggcgtgatcttgagtagcacgatcgtgacctattcagtgcttctacttccgcaaatccttgccttctggacggtgaagtccggttcgatcttcgaaatactcgacaaatgttgggatttaaacaatatgccgatgtacatataccccaaatggctgcggagaattgggctgtatgttgtgccgatcttgttcatcaccaacatgccgtcggtttatttgattgatcgattggacttgttccttgggatatggatttttgtagctcccgttatatcgcttctagtggtcaggctgttctggaagctggccgtcaaacgctatgaaagcgccagcagttagagaaatgctctacaaacaaattgttgagaaggtgaattgaatgagcaagacggagcatgagcgtcatccattgcagacagaggccattacaaagaaacggctgcacaacgggattgaaatctatcaaaacaacgaaggagagaccgagtttctctacaatgagattttccacaaggagatgtatttcaagcacggtattacgcttccggatcatggcacggtcctggacgtcggggctaatatcggcatgttcagcctatatgtcagcagcaagagcgactgcagggtgtatgcctttgagccactgcctccgacgtttaaactcttgaagatgaatacgagctcgctgcctcgcgtaacgacggttaacgtcgggctttccaatgagatcaaggaagcggagtttgcctattttcctacgatgtccacggactctgtccagatcaaatacagggagaaccacgatcaggatctccgatacgggttaatcaaccattacgaagataatttcgctgaccggcgaatgctaaaccgctttgtcgatcatcttatgtcgccgaagcttctgaatgaacaaatctatcgttgcaagctaactacgatatccgaaatgatccgtttttatgatctgaaccaaattgatctgctcaaaatcgacgtggaaaaaagtgagttcgaggtgctggaaggaatcgaaccggaagattggggcaaaatcaggcaaattgtaatggaggtacacggactggacggagagcagatcagcaggctcgagaacatcttccaaaccaacggcttctatgccgtgatcgattactacgcagatttgaatataccaaattactataatgtgtacgcgttgaatcaaatgcatacgtcggctgggtgatagtcatgctacaacatctacatgcaaggttggtatgctccagctgcaagggcgtgctggtccagtcggaggcattgctgcaatgctgcagctgcgatgcggtatatacgaacgatgaccgttatgtatcgatgctcgaccggcgtgagcagtatgtccacccttccgaatggaaccggaaagaggctgaaattcgggattatagcgagatttcgcactctcttgcgttgtccggtataggccgattcgccaccttcttaaattatggttacgtcccgcacgggaatgagcaacatgcggtgatcgaacccgacgatgcatggaatagaaactcggtcaagctgctgcttgagacagtgggcaggacggcgattcgggagcggcaggtgatcgacatcggatgcggcaggggagggaacatagcagctctgtctaaatatttcaagccgctgtctattgtcggtctcgacatctgcccggcgaatattgcctattgcaatgccaaatcccgagggggtgaatctttttatctcgtcggcgatgcggagaatataccgtttgcagacgagagcttcgatgtggtgttaaatatagaatccgcacatgcctatccgaaccgatcacgattctatgaagaggtgtaccggataatgagagttggcggcgtatttctgtatacggagctgatgctgggagatcaggtagcgcagaacatcaggctgttagaggaagcaggcctgtctgtaatccgcaatcaggatgtgacttcgaatgttcttctatcatgtgatgagagtgcgaagcagcgtactggcacacaagggatcgcgagcaacgccaaaacgagcacgaatattggagatatcaatgaattcatcgcattgcccggctcgaagaaatatgaagagatgaaggctggaacgcggcaataccgtatgatgaaccttgttaagaggtaatatagccgtaatatcaacaataattttagtataggagaaatattgtatggaagaaattatttccctggacacctttcagcccttcgacggcatgacaaaaatgtatcctcatcataattttccttattttaattgcggctataatttgttgttaacgcttgccagatattttaaaaaagatgagttgccgattttgaataatgtcattagtatttatagatttgataaacaaaaaatacaaacaagaggatatttcaagttagaggtgttggatctggaggagggagatcagatccttgaggaaatggggatctctattcgtaaaaaatcccctgaactagatacgttacaagatgagatcataaactctatttcaagtggtcatccgatttccatatttattgatttattttatcaacgcgggagagacttttactataacaaaaaacatggactgcaccctgtttttgtctatggcttcaatcttacgaacgaggaaatatatacggttgatgatattacagaatacagacaatattctctgccattttcagaatttaaatggtcatgtatgacttcggaacacgtaaagatgccagactacttttgggaatatgtgctagtgccgcccggtaatcatgagatcttgaacaataagaatttagcacacacaaccatcaatacattcgtagaaaatatgtgcaggtatcaaaaagaaataacggaaagtttgaataatatactgttgttggcagaaaattacgagctcattataaaaaatgaaacgattatagaaacactgagcagtactatttatagaaaatgttctgagaaatacaggttaaatactctctataagtacaacattgatcatatcaatgcaaaacatacgcttgacccgttattggaccaaattattcatgactggaagacagtaaggatctattcgaataaagccatcatgtcccaaaagctcactggggaaatcatagacaagtgcattggtttatttacaaaaatatatacgaatgaagtacattttaataatcaattattcttaatgttaaaggctttcaggtaaaatcacatctaatattgctagaaatgagccgcatcaacaggcatactctacatgtgtcttttcatcgtatgaaaaccgccgccgctgtctgcatcaacactttaaacacaaacggctgagatgccgttttttttgttttgattttgttacagcacactagtcatgtagagtgttactcactgttggtcaggaaagactaatagttgagatgtattggcgaaaatagcaaagaggggaaattaacccctctttttcttttcccctctgaactaccgtgtcccgttagtatcaacgaggccgtcttatctttcatttatgacaggtgatgatcttgtaaagatctatgtataaaagagtaagtggagaatatctcatcgaacaggcatatctgacaaaaacagaaaaaactaaatttcagctcgaaaatccgaaaactcaactcattgaaaaaacctctctatctaagagtgaaaattcttggcttaaaaagccagatgttgtatccaaggtggcgcagtatagctttgcttctttcgcagattacatcacagagtggaacgatctctcttttcctggcgcaacatgcggatcaggtatacggggtggagatcgtgcccgaagcgattgaagatgctcgcagcaatgcgttcttgaacgagatgtgtaacctgaagttcgaagttggcgcatccgaggaaggtattctatgctagaaagaacaaggtattgaagctgatgtgatcgtagttgatccaccgcgcaagggctgtgatccacgtttgctggaaacgattctggagatgaagccggagcgagtggtgtacttgagctgtaatccgagtaagctgccacgtgatttaagagtgctagaggatggtggctatcggacggatgaggtaacgccagtggatatgttcccacacacggtgcatgtggagtcagtgtagcgatgttggttagggtgtagtgttttgaagctacatttacctgttttaataaattactttgcccgaagcttctaaagctcgggctatagttgttataaccattagtagagttgatgttggtctgaacaatatcaagttttccagtttatcctttttcaatagctttgtgttgttgctcagtgtttgcaaatgccgcagtaagacgtggtgaaggtatacctaacttttttgcttctctcacaacttcaagtactgcaaaaccggctttactattgttgtattcaatgaaaagtcgcggtaagttgccctttgcaaaaataaccttgttaaacagcgtgccgagaagtgctgatggaattttggtcaacagtagagtaatcgcgtccatctttgcgcctcttgcattaagtacaggtgccatttcccgcatattcttaccaacatttgcgaatgagtcacgatgattcataagtgctggaaaacttccccgttttaacacctcggtctccatcgccgcattcacggcaaagtgattccatagccagctttgcatatcctttatccaattgattttaaaatgggcgctttcaaatagttctttgaccttgttgtttatctgttccgtgcctacacgtggtttttccagaaatatcgtttttaagaagccgcccctaagcttattgtcctcaatgccgcctcctgctcctgggaaaccaaagacaacattgttcatagacaagggcaagatcgatgattttaaatcctgccaaatattattgaaaataaggatcggggtgttacccgcggtagtcgatagtaattgtgctgcttcgggaagttgtttcgtgttgacactcgcaataataagatcgtaatttgggcttatctcctcatgcagcttgactttccagttttccttgattaaccgtttcgctcttcgtgcgtcccacatttcaagcgctatatgacttccgaaggtttcttttctcccttttctaacgtaaaactcaacggtgtggcctgccttttcgaaagcccacgcgtattgggtcgatattacacctctaccgaaaaataaaattctcatcttagcctcctaataatcaatattcatccttgttgatgatccaacaacgtgttgtataatattattgtattgattcactatacggtcatcaaccatcagatttttaatatctgtcggataattgatcgaacagcaaacggaggcaaataatgaaaaagcaacctgaaattacggacaaaacaaggcagacattcataaatgtattctgcgatttatatagccaaaaacccatcgaaaaaatatctattcaagagattgctaaccaatcaggatataatcggagtacattttatcaatactttacagatatctatgagttgttggactgcgttgaagagcgtattttgaaatccattaaggaggaaatggcaggcagagagttttctacacatactattcaagatgcacttcaatgcttagaaaatgcagaggagatttcagttcttaaagctatattgggcgactatggttctgttcattttgtggaacgcttgaaaagagaaattccctttgagcgattgattgtggattttccaacagatgatgtcttggcaccatatatcattgagttttacatttcaacattaatatctatgtttcgtctttggatacgcaacgacaaagatctatcgtcggaggaattgatcaaactgatcgatagtctattttcaaaggggataacaccgtattatatctttggcacggtcaatccgcagcgttctggagtgtaacgatgatggttagaaagttaaacataaacataaggggttcgagaatttatacataattctcgaaccccttcttgtctaatacacatgcacactcgcgccaaccacagatttgttttgtacggaattaccggataaatataccttttgcagattaggcagctgacttagggtctcgatattggaaatggcattgttctcgagatgaagctcttctatggcctgccagttactcatgaattcgagagaagccaagttgctgtcttgcagagtgaaggaacgtagagcggacattttggcaaagtaaggcatcatttgatcaatttcagtaacagaggtattgttcatgctaaaatatgactggtttaagatcaaatgttcaagtacgctgttctccgcggccgccttttgttcaaagttcagcctacactcggagcacaccaaagatttcacttgcttcaaacgaaatagggcatcgctttccttgaacagtgacgagtcgtaaatgtttaaagtctctaggcgggacaagccgtccagggcggcaagacgggttatttcatcgatctcccagagcgagagttgctccagtttcgggaatttccccagcgcagccaagttcaattccccacttccgccacggagtgtcagactggttgtagccggggcctttagcccggggagaaaggagcttggaatttccactcgctctactttaggcagtgtcagcgcttccgcattctcgtagtagccggacaacgttaattcccgcaaagagggcagactgtttatggcctttacggtgccaagctcacttagagaagccaggcgtagtgtggtaatagagtttttgccggtcaagcgctccagactggagaagtttacattttcaatatctaacgtttgtagagcaggcatattttgcacaaagtcgatggactttacattcgttaaataggacaactgaagctcctgaagctgggtcaaggcatacagcggctgcaggtctgtggtttcactgtactgtatagacaaggatgataacccggtcatggacgacaaccatccgagttcatcgacaaaggtgagcgacagggacttgattggcaattggtttaacaagtgaaaatctgttacggactcatccacataggtaatggataaagagttcagattggggaattccagcaacatagccaattcctgattgctgcgaagctgagtggtaagctccgtaattttagacttgtcgccaaagtagcccgaaaatgtactgaaggattcgttaaaagcgccagcataactttttaatccctgcatatgggccagagtggtttggtccgtctgggatatttcataggtattcgtcaggtccaatgccgtcagtcccttaaaagcttcaaaatctcgctgatcaatccgctggctattcagtttcttgtcctgagtaatataagtgatcttctcggcctgttcatcgctgaagggatcggagaggctatatgtaaacttccactgatcattctccgaatgctctacggttaaatagcgaatacgagccaattcctcctctgttggcaaggcggaccctttatcgaagatatctcgcaaaaatgagagcagaacctcgctttcgggcatctttcgtacaggcagattggcttctgtttttggataggtggagctgttgctataataaaaatatgtaccgatcgcgccagttaggattaacatcagtatcagcattacctttacggaggcagtctgcttcggtggtactttagggggcgttccatggtaatgattaatagtctggtctacgtaatagacatgattttgcttcaataaaagttctgtttcacaatagggacactttaaaacctcatccttcttgtattcaattcttccgttgcaattggggcagtttagcgggataaacgccacgaatgtcccctccttcattatgatggtcataagatcatgctgaacggtcatctgatttcattataccttgtgaatttacgtttgatgagagaaagaagtttcacataacgaaggagcagggaatcctgctcctttttgatcttttttaagtatggtctggtggtaggtcttattaaataaatcatcaagcaatagatgtaatcggatgtttaacgtgcagagggtagagatgttcaccatgggttcttacaaataaaccttcattggtgatcgaactttttagaacgatatcatctgttgcatctggagtgaaatgaaaggttactttctctgtatcttcatctgcaatcttatccaagatatctttcatattcatttcgtttaagctaacaacgtcgaagagctcaatatgattgtcttctttctgataaataacaatgacgttttcgttttccaagtaataaatatcatcactaaagacattcaggcaataaaacatgagtattccttgagcatgatgggttgcgaaatgctgagaaacaggcaatctttccgatgccaatttttgaataagacgtaaatcctccgcgttagttacatttagttttcggatgttcgcaggctcgggtgatttttttgccgtataatttattgaaaaaagatgttcttccacaggtttaaacccaaacttggggtaaaaatcgagcacagattcattggcaaaaaggtacatataatcgtacttgttctcgtattcctctaaaactttgttcattaaacgtgtagagagtcctttcccccgataatcaggatgtgtcatcaccgtgccgatttgaatcgcttttttcttctcaccgtgaatgatgagctcaaggatgttaacagaaacgttggcaataacctggtctccatcgacatatgaataaggaatgtaacgctcgccccagtatccttgttgataccaatcttcaaaattgatctcaaacgtgttgacagcaagctcgaaaaaactcttgcgcagtacttcattgtttttataattcttcataaatattaattcttgcatggtattacccccttaatcctcaaaaatgactgtttgtaaagtggtacgatcccgtatttaactatgtaaagtatgattacaggtgaaattctgcttataagttgttgttggttaagcaagatttgtaacaagagaaagtggagtttgatatggaaagagacgcgagcgaattcgcgtcttcttttttgcatgctttataggatatgcttaaatgcaattgcgtcagtgaactgtttttcactattgaaaatcttggtccattaatctacggcaaaatgcacgattgcactatataacatcttgttgcgaaaagggtcaaacgttacttgatgctgaacttgcttcacgcgcagcattaatgctttgttcattccgattcgctcttcgatcgctcgttcgagttcacggaagtcataagcctgcaagcattcgactttgtctttgatcatatccagtgagatttccatatatcattcaggcctccttaaaatctcgatttgcaggttaaaagcctgtcgagcttcattttagaggagcttttccagttcggcaagagcaatcgggctgaaaatctaataaagacgtgataaaatcgggaaagggcaattttgaaatcatcgaagttccgttaatctgaagatctaatggaagtaataacagatactgctgtttgaaggaagttcattcgcatggtataagtgaagaagcaaggacagcataatgtgaattgcaacgaaactgcgaatgatcatgtaaatgataggcaagcagatgcatgagttacgagttttactattttaactattaaatgaggacaaagactgtcctggaaggtatagaggagcttttgagatgacaaaggaaaacttttggcgtgaattgccacgaccattttttatactggcacccatggaagatgtgacggatgtggtgtttcggcatgtcgtaggtgaagcgggaagaccagatgtgttttttacggagtttgcgaacacagagagttattgtcacccggaggggcaccatagtgtgcgcgggcgtctgacttttacagcggacgaacagccgattgtggctcatatctggggagataaaccggaattctttcgtgagatgagtatcggtatggcgaaagaaggatttaaaggtatcgatatcaatatgggttgtccggtagcgaatgtggccgagaatggaaaaggaagcggcttgatctgccggccagcccttgcggcggagattattcaggcggcgaaagccggggggctgccggtcagtgtaaaaacgcgtctcggatttactgaggtcgatgaatggcgcgactggttgacccatattttgcaacaggacattgtgaacctgtctattcatctgcggacgagagaggaaatgagcaaagtagacgctcactgggagctgattccggagattaaaaaacttcgtgacgagatagcgcctaatacactgctgacgattaacggggatattcctgaccgtgagacaggcctgagactcgtggagcaatatggtgtggatggtattatgattgggcgcggtattttccaaaatccatttgcttttgaaaaggagccaaaggaacacagcagcacggaattgcttgatttgctacggctgcatttagatctccatgatcaatattccgagcttgaaacgcgttcgttcagcccgctggcccgttttttcaaaatctatgttcgtggcttccgcggtgctagtgagctgagaaacagcttgatgaacgccaaaaccacttctaaagtacgcgaattgctcaatgagtttgaaagcaatgaacaggtagagtagagtaagacgtaatcatggatacggagtatgattcaggtagatttaatagccaaaaaagaagcggtaactcttccgcttcttttttttgctttgctgtttaacgcgtatacgcaggcttttccatagccaccggctgaggattggcaagcacccataacacagccaactcggataatctggcgggcgcatcaaaatcgtatccattgtgaagtctgctgaccaagtctgttgcctcttggagcagtgccggggcgagtggcgcaccagagcccaggtgatgaatcagtgcatcgagcatcttgcgatactccgcatcccagtttccaccgccattatccaatacttcatgggatacacgtcctgtgatgcggatgacctctccctgcaccgtttgagcatggccctgggccgggatgagagattcccacagctcttggtgctgtttggtccaagaggttgcctttacctgaatgggtgaagtcccgtcatgcatgatccgattcgctaccggctcgatatcaaataactggtacagtttgatcagcgcgtctgaaacttcatcgaccttgtccttattgaacttctcacggacgaattcaaaatccttaccgatccgcttcaccgattctttcatatccggggtgaccgatgctccggcatccagcagaattgcggcaatctctgccagattgactatatcgctattcctgcaattggctaaccccttagctaatggcgtatttccctgtttattttctacgttaatagtagcgccttggtttaccaactcttgaaccactttggttcgatacccattgaccgctgcatgtaacggagtttcattttggtaatccacagcgtccagatccgcacctaattcaaggaacaggggcacatttcctgaccaatgtgaggcatgggcatgtaaaggcgtgcgttgatatttgtcgcgtgcattaatatctgccccttgcgctaccagccagcggaccaattcatccgatatttgacgaaagctgagggtcgtacctttgctgtaacccccgcgggcatcccattcgcattgttcgaaaatttcttttacggttgcaatatcattatctttaacgagtttttccatatgagcaggtaaggttgctttcttcgtagccattacactcttcctctcctttgtgaataacaacgtatgttccgatggtaggctatgacgatttaatagtaagtagataattttctgcaattttatcacatagggaattttaaaaccaataactgggtttcttccatcatccatttggtttgctatgttataatttagatgaatgttgatactggagacggattgataaatatttgaaatgatcgccgcaattcatgcggtaggcttttgataataggaggatctatgtcctggagtaaattgaagcaacaactggagagttttcttagtcctgcgttagttggaagggtggagtaccgtgccaccagctatagctattcacctgataaatcaggcaattgttatattactgtagataaaaagaatgtactcaacatgagtgatactacaaccccaattcgatggtatcagtcagagcaggagatcaagagcgacccggaaatcatgattcctgtgagcgatgaagagattgaagctatcagaaaagattccaaaggacccattcccgaggatcgtcttcaagtcatggcaagaagtagaaaaatctccgtacatgccaaagagcttttgttggctcagaccgcacttagtaaatcgaattttaccgttgcagctacgacgtatttatccacttctatagaggataatctggagagcaaggatatcttgtttaatattctggctttaatggacagacgagttggcaaaaagagaattctgaacatgtcggagcaggtcaaattaaagcatccagcggtacaatatttttatgaactgcgtcgtcgtacggtgtgagatttaataacgttcacggatagaggtacactttgtcggtgacggtttcactgaaatctgtctaataagtggatatagcttttaactataaccagttatggttttttagtatcccttctaactgctctcagcgtgatatgatcattgtatacaacgagggggttttttacatgactgataagttccagatcgtaggaagtttattgcggccggatgagctgctgaaatataaaacgcaaattgaacataatgatgatatccaatatccgttctatgaaaactacgaaggatatgagaagtgtgagacagaggcaatcaaacaagttgtcgcaaaggaaatcgaacataacttgtccgtggttaccgatggcgaattctccaaatcgatgtggcatctggactttgtatggggatttggcggagtgaagcgttacatcgcggatcacggctattttttcagagatgtggacggaacttcgaaatatgaaacacgcaaagatattggactgcgcatcactgataaattgagtggaaagaaccatcatttcattcaactgttccaacaactgcaagacacagctggcgagcaacaaacgaaactttgcgtaccgtctccttcccatatttttggtgagctttcctggtcagataacattggtggaacggatgctgtatatcaaaacatacaggagctcaaagagggtcttgtgatcgcgtataaggaattcgtggaggaattcgctgcagtgggcggtaaaattctgcaattcgatgattgcttgtgggagctgtttgcagacgacaacccgaactctccttttacaggggaaaatattaatcaagatgaagtaaagggtctcgctaccgaattcattgatattaataatactgtgattgactttggtcatagccttggcttgaaaatgtggacacataactgccgcggcaattatgattcccgcaacatgggtggtggatcgtatgccaaaattgcgaatctgttcctgaagcaattgaagtatgaccgtttcttcctggagtgggatgatgatcgtgcgggttctattgaagctctggaagtgttcaaggacagacctgaaacggaaattgtactgggtctgttgtcatccaaaacgagtacactcgatgatgaagcacgtgttgtccgtttgctggacgaagcatccaaaatcatcgataaggatcggctgctgttgtctcaccaatgcggatttgcatcctgcgatggtggtaacgaattaagcgaagctcagcaatgggcgaagatcgatcaagggcagaagattgcaaagcaatattggggcagcaccgtctaggattcaagctgaatgtattgtgactttataaacacattgctcgatcaatagtgttctgtgcaataatgaaacggcgacttttcctctggaatctatccagggagaagccgccgtatttgttgtggaacgtacgtatgggtacgttctcatttctataacttttttaaactaatgatggggcttgtcattttttatttctgagattcacgctgtgccagccattcctttttcaacaaagcatattgatacgtattctcgtatttcggtgtgccgtcctcatttttgacaaatgaaacgaactccaaaaaaagaccctcccggcgcatgcccagcttctcacacagtttctgagaacggaagttatcatcctcgacataagcgtacaatcttcttattccctgttccataaagagatgctcgatgaaagcattggcgctctcactggcgtatcctttcccttcaaatctgccattaaaattccaacctatactatacgtatctgaattcgaatctttatccgtatcggaatcccgatcttccctcataccaaacagctcaccgatcaactcgttactgtctttcagacagactgcgatgtgggaatcgtcactgcttctttttgcgacctctgccgccgcatcttccaatgttgaaatttgttgatccataaaacaattcactctgggatttgctgtgtattccaacagtccggctgcgtccgttacggtgaaatttctcaggattaatcgattggttttaagtatttgcataagatgatatacctccggttttcatatcaatagattggctttgttcatgttgtatctctttttattttacgagacgccctattcgtactataactgggtatagccttgggtttggctttggtactgtctgaccgggagaacaatcccaccaatttctccctatagatataaccgaatacgaacccgattacagcgacaacagaaataataatggcgattgtgtattgttgcatatgaatcgtggaccctacaacggtagatgcgatgatccatggcagacgaccaacgataaggatcgtgaagaacctaaacgaactaatcgatgtaagtgcggcgacaaatacaagcatgtctttgggcaagccgggaattacgaaaaagatgaataaaaaagcggagaacttcttctcatcatgaattaacgacatccacttattatttttcttttgcattagccgtgaaatataggcgcgaccgataaaacgagtaaaataaaaagcaatcgctgagcctataatcaaacctattgtagtatacaaggacccaagtgtaaccccatagatataaccgcctgcaatctgtaccacttctcctggaatgggtgcaaccacgatctgaagaatctggaataaaataaacatgaccggaccccaatggcctgttgaatgaatatacgctctgaagttgtccatggaagacatgattttaataagggcaggagaataatacaccagtagaccaatggacaacatgatgaacagacccaacaatatgttaatcattacttttttcgaaggttgtggcatacctgacgacccctttgtctaataacttctacatatttacagtataagacgaaattattaagagatacctacataacttctgaagaattcttaagtcgattgtatttgctggtagtcgctaatagcgcatattatactgaaattagacggagggatcagatgagcaagaaaattctaattgctgatgataacagtgaaattcgtgaaattgtaaggattttgttagagagtgagaattatgaagtgattgaagcgatagatggtcaagatgcgattgataaagtgaacgaagagacggatctcattattttggatatgatgatgcccaataaatcgggactgaaggcgtgtctggagattcgtgaaaaaacaagcgcaccgatcctgtttctcacggcgaaaacgcaggattctgacaaacaattggcattttcctcaggcagtgatgactttttgtccaaacccttttcctatacagaactcgtttcgagggtgaaggctttactgcgaaggtattatgtttatcggggcaaggagaagaccgaagaacaggaccaaattatcgttaaggatcttaccgtccatcaggattcaaaagccgtgtttgttggggagaaggagattgctctgactgaaattgaataccagatattgctgctattggctaagaagcgacgaaaggtgttctcggcagaaaatatatatgagagtgtttgggggcaaccctacttttatacgtgtaataacacagtgatggttcatattcgtaacttgagaggcaaactggaggatgacccgcagaaccctaaatatgtgaagaccgtttgggggaaggggtacaaaattgaatagattattaatcggaaaaaagctgaagattaaactggttctggcggttatcatttctttggttatttccataagtgcacttgttattttacaagttgttggcgagactctattggatagttatttaagcaaatccacttttgtagagaacaggcagcaagatgcgcttgatcgattcgaagcatttgtgaataaccagaacgtgtcaacccgtgatcatgaggaattgtctgcttggataagacatgagcgctacttaaatctgtatatttttgcaaaagacaaattgatattttcctccaacacggagattgatcctgccattaatgaagagttgttaactcaattcgtgccatcgaaaatacccatcaccactatccattttgcggatcaggatgcccagatatacttggttagcttttatgagtatcaatattacaacctcattctgattattggtgttttcatagcggccattgtgttcattgtttcctttctactgatgattaataagaaaacatcttatattggggtgcttgaacaagagatcaaaatactcgaaggtggaaatttggattattcgattacgatatcgggaaaggatgaactgtcatctctggcccagagtattgatgagatgaggaaatcatttgtggagcggctgggcagcgaggagagggtcaggatggccaaccgtgaattgatcacggcgatttcccatgatttgcgaacgccactcacgattctattaggatatatggatatcatagagctcaacaaatataagacacatgaggatctgttgcagtatattcataatagccgggagaaggcctatcagatcaaagtgctgtcagacaaactattcgaatattttacagtatccgccgctgaagaagaggaagtagaatttgaagtgtatgagggcagagcgcttatcgatcaactcatagatgagcaattagtggttttggacgatatagacgtgcaggttcagacagatgcacatcatgaggagtttttgctggaaatcaatttggtcgccatgcgtcgcgtaatggataacatattttcaaatattcgaaaatacgccgatccagggcatcccgttcatatccagatttctttgaggcaacaatgggtcattcttgaggtggagaataagattaaacatgttggcaaaaagaaagatagcaacgaaattgggctcgttagttgtcagaaaatgatccagcagcataacgggacgttgacggtgtcgcaggaaaaggatatcttttcactacagattaagctacctgtcatcttcaataaaccaatacagactcatatataacggatctcttgaaatgatgctgattgtcttccgtgggattcctctggttgtctgattttgttaccttagactgctgtagtggaagtaacttgctaaataggcataggcgaaagaacatcgctctaccatttacactatacaaaaagagccatgcgacagcatggctcttacatatatcgcgagagggcaagccttatgttttaaacaacaggtgcattctgtttcttgaaatattgttcaattagaaacgcgagcatcggtccgggctcagcttgctgtaattgagcctgatcgccaaattccatgagatacggctgttccgtagtacaaggagtccaatgaggcattagctttccggtggagtccgagccgttcggatcacctgtagcaataaagttggataaataattacacatctggcgagccagatcataatgcttgcctgtgaaaggccgccagcatttggcgagtgtttcgaagaaaaaccacagatcgacggagtgaaaagtgcctggctggtcccagcccggaatctcggcgtcgaagttataatagtagagaggcgtttcggacggatgaccactattcgcgcgaatggcgagcagaatggcatgctggatcatgcggaccgatgcctgttgcagggcatgctcgaattggccggaattagtctcacatagctgcaaaaaggtaggagcatcctcgccaaacagctccacagccatctgcttcagttcttccagattggctgcggcgggacgggtccaaaattcggaagacgtatgccccagcattacggggatcgcctcgcgctcctgctgaacaaaacgagtgaacggatcgcctgcgcagaattgttcgtcgatgacggttccccagaagcttttgtattcgagtgctttatcacggagatatttagcatccagttgtctcgcctcagccagagaagatatgcccaggaagccaaaaaatttaacccctgcttgctctgcatcccttagtgtggagcggacagaaggcacgcggaccttcgggtacaactcggtagctataccgctcatgatgacggctcgctggaacaaacctttattttgaggagaggtcatctggctgagtacacttcctccgcctgccgactgtccgccgatggtgatctggtctggatcaccgccaaaggcggcaatgttgcgtttgacccactgggtacctgcttgttgatcaagatgaccaaagttggcgggtgcatgtggggattcggcactaatctcaggatggcacaggaagccaaaggcattcagtcgataattaatcgtcacaacgacaatacctctacgagcgattcgctcgccatcaaattccatttcggccgtatggccgacttgcaggcccccgccaaaataccagacaaaaacaggcaacttctcgtccgtacgtttggcgggtgtccagacattcagatacagacaatcctcgtccatgggcaggtcgggatcaacggcccattcgcgggtatagatattgttatcattgatgactgttggggcttgcatggagatgggggcaaaatcaaaagcttgcagtacaccttcccagttcgactgcggttgcggagcgcgccagcggttctcacctacaggaggtgcggcaaaaggaattcccttgaagctggtaatccgcgggtccgccgcgggcagtccttgcacttgtccatgttctaccgtaaccattctaagcatacaacattctcctctctggatttagcatgtaagcgttaccaaacatctgatcaacgtggcattagaaagggggaatcaaggttgaatccgatttggcatgagagcagtagagccagtaatttgtattttatcagcggtggtcacaagccagctaaccctcaccaatgggggccaggcgtgcgtgacgtttatgcgctgcactatattatccgcggccaagggacgctggagacgggcggtcgcgtttttcggctcgttacgggggaaagctttatcatatttccgcaaaaggagatttactattatccagacccgcaagatccatgggagtacgtctgggtggagtttagcggtgaggatgccgggcggttgctggggctgacacagctctcagaggtacaacccgtggtgacggtctcgccggagacattgcagccttttttccaccttgcctggaacgcgggtgcatcatcttatgaattactgcgggcggatgcacgtttgcgtctgctgctctcctactatatggagcattatccgaaagagccgcaggtggacgccaaggattatgtctggcttgcgagaaagtacatcgagcagaactactggaagccaacattgaccgtcaccgagatcgtaaaggcagttaatctggagcgcagttatttgtttcgtctgtttaaggcagcaaccggcaagtctgttttggagtatattacatcctgccgaatcgagcgcgcctgtgaactgttgaaaacgtcgggcctgccgattcaatcggtagcttattctgttggttacaatgatccgttatatttttccaaagtatttaagaaagcaacttcacacacgccaacatcgtacatgatgctgcacgggaccaaggcataacgttaacggaacagggcgcagttcccggactctcgaaaataacggatcagcttctcaataggctcacgtccacagttcagcttcactcctatacaatcaatgcacagaaattgctgggcagagcgcgagatcaatttgaggtagatgcccacatcgtctgaagagagcgggacctgacaggaggtgcacaggcgatgttgagccatctatttcaccagtttggcccggacgacgaggcaatcatgtgctgcgacaacgggagcgaagcgttcacggaatacgccaagctcttgatgttcccagcagtcatacagggacagggcataaccggcagcataaggcagacccatatcccaaaattgcaaagacaattcccgctggctgtcgctcaggttgaagaaaccaatagctagatcaccatctgtgagtaccttcaccagcataaatacatcgtccgtgtgaaaccattgcggttctggtttaatgcggtaagctccgcgcgcttctacatcctgattgatagcgatcaggtcaggattcaggagaatatcttttgtgatctggttagccttgcgcacgtcacatccgatcattaatggggaacccatcatggaccagagtgagaagtgggttttatattcgatgtcgttgcatccgccgatgctgccgatataatcattgttgcttccaccgtacataccaacaatcagcatatccatgtcgttatggcagaaggagccggtgtagctttgtttgcccaattgagacagggcaagttccttcactgaatcccaattgtcacggatatcgccggtggagcggtacatatgagcccccgattcgcgaatccaatcgtatacatcgtcagctccccagttgcaggcggagaacaggatatcgcgtccgcagtttttgagcgcaaggctcatccgtttgtacagcagttctcctgagatatggcgcggcttgaagcagtaatcatacttcaaataatcaacgccccattcggcaaaaaggacagcatcctggaattcatgctcgaagctgcctggatacccggcacatgtatgtgtacccacgcatgaatacatgccgaactttagtcctttgctatggatataatcagaaagcgctctcattccactcgggaatttatccgggtcagccaccagattaccgctcgcatcccgttccttcaggctccagcaatcatcaatgacaatatactcgtaaccagcggccagataaccttccgatacaaacacatcagcgacatcccgaattaattgttcgttaatatcccacgtaaaggtattccacgaattccagcccagggcaggggcgaagcctaacacttgattgttgctcatgctctcgcatccttcctcatctcggttttgttaacaacactaaactgaacataaacgatgagtgacgtatcctgccatagcttaacgttgcttggacatggacatatgttgctctgcttgtgctgggggaatcagctctttccaatcaggccctcggcaggtattcagaagttgccagtagaagcataagaaaggaaaaatgtctgtctgtgaagaagttatatctatcttttcagggatctgtgcgaaacaagggtatagatgttatgatcggtgataatgctcgaacaggatgtcagagcaacagggaaatctgaatagtattcagttctttcaggaaaaataccccagtggggaatccctcatacgaatggtaacaatcccgccgggacgattatgcatatggcagaagggttccaattggataatgtgcaatttcccatcggtttttcgttaaacataagtgtctgtttgatatgatcagatatataatttataggattgggagtgtcacgaaatgaatctagatgaagtgatgcaggagcttgaagcgctgggcaaagaacgaacgaaaaaaatctatatctccaatggtgcgcatgaaccgctatttggcgtggcaaccggggcgatgaaaccaatggcgaagcggatcaaaaaggatcaacctttggtagagcaactatatgcaacggggaattatgatgcgatgtactttgcgggcgtgattgccgatcctcaagcgatgacggaagctaattttgaccgttggattgacgctgcttatttttacatgatctctgactttatcgttgctgtgacgttagccgagacggatattgctcaagaagtttcggataagtggatcgccagcggagatgagctgaaaatgtcagcaggatggagctgttactgttggttactcggcagtcgaaaggatgctgagttttcggagaataaactgatggagatgctggaacaggtgaaaaagacgattcacgaatctccggaacgaacgaaatattcgatgaacaatttcctgtataccgttgcaacatcctatcaaccgttgcacgatcaggcagtggagatagccaaggctgtgggacctgtcgaagtgaacaaggataagcccaagagtaagctgctgaatgcctctgagaatatccaaaaggcagtggaaaaagggcggacggggttcaagcgtaaatatgtaagatgctgaaattttcgccgtagcgtcagttttaacatacggaatatatggttatcgtaggattgaaatccacaatctccatgttataatgaggacagaaacagcttataatgcaaagagagccgtgcgctaacacgactctctgatgcaatagccgcttttaagggcggtgggcttaacaaacagggtaccgactaaatagaccgcatcccttagccagagggcggtctatttgtctttattggacagcaacgctacaatcagcaaaccgaaggtaagcattagcataattgcttcaaatactgtcacaaggcatcacctcccttccgggagattagccgaccgcccatataagcctttccattgctctgtgagtataccatatttttcttggagctaatagatgaacaataattcgtttttataaaagtttgggaatgttaatgacctcgtactttgagtgcgagaagagcgttacggtggctagtatggaagttatttagttgcaaacagataagaaaaacacgccatttataggcgtgttttttgttgacagctagttaataagcatatagcaacatcgaggctacatatcgttccttttaaccatttctttggcttgctgcctgcccgccgagagaaagctgtcgctaagctcaggatcactaacagagcgtgcaagtacaagcgaaccaaccattgtactgaacagtgcacgaccgctggacatatcgatctcagccagattggagataaaagtgatcatccgctccaattcatgggtgaacacctgccgaacctcttcggacgaacgggatatttcgctggaaagggcggggaaaatacagctcatttctgtttggtcgcggtgatacggactcaaataataatcgattactttattgattttgggattttgctcttgctgatcagccacgttctgtagaagtgcaatggtatcactgatggcatattcgcaggcttcggcaactaattgttccttgttgtcaaagtgtgaatagaaccctccgtgagttaatccagctcccttcataataaacgggacactcacctcctggataccattggtgcgaaaagctcgagccgcactttcaacaatcttacctcgtacttttatcttatgtcctttgggatagggcatgatcattcactccatagtttcatcattatgctttttaaaatattatagtcatcataataaagcctgtcaatttggcgactgaatatcagttgatttagaaaagggccaaatacggttgttgacggtcttaaaatatgatggttataatatattacggtcatcatattttaaaatgacttcaaatcgggaggtatcagaatatgagcaagcttgaatctgtggatacgttagttattggatcaggtccagggggatatgtggcggcgcttcgttcttcgcagttggggatgaagacggcgattgttgaacgtaaacagctcggcggggtctgtacacatgtgggttgcataccatccaaagccttaattgcggaatcgcatcgctatgattggttcagacagttcaatcaaactgactcggcagcgacatttaagactgctcaggattttaaacagggggttgtgaataaacaggcaggtggcgtccactatttgttaaagactgcgggtgtgaacattctggaaggagaggcccgtctggtggatgagcacacagccatgatccagcaaactggacaggagcaaatcatttcttttagaaatctgatactggcaacggggtctagtccaattgagctgccagcatttccagttggaggtcgtatcttgtcttccacagaagcactgtctttgggggaggttccgagtagtctgattgttatcggcggaggttatattggtgtggagcttggacagatgtatgcgaaattcggaacaaaggtaacgattcttgagggtggcgcacaagtgttgcccggattcgaggcggaacttgcagcccctgtagtcaaacaattgaaggcggatgacatcaacatcgtaaccggagcgattgccgaaaaggtggagcagaatgcggattccgttacactgcattattcaaaaaatcaggagcaacaacaagttacagcagaatatgtactggttacaatcggcaggaaacccaatacagacggccagttaggactggaacgcataggtgtgcccgtaacgaacaaaggactggttgagacggatgaacagtgcagaacggttatcccgcacatttatgccattggagatattacagccggtccggcacttgctcacaaggcatcctatgaagccaaagtagctgcagaggccattgcgggtctcacctccaaagtggattacaaggtgattccgcttgttgtcttttctgatccggagctatccagtgttggagtaagtgagacggaagccaaaacacaggccattccagtggttattggaaaatcttcttttggaatcaacggaagagcattggcgttaagggaaaccgaaggttttgtgaaaatagtggctgacccgacttcaggaattgtcattggcgcgcaaatcgtcggcgtggaggcatctacactgatatcggagctcgcacttgcgatcgagatgggagcaaccgtggaagatctggccatgacgattcaccctcatcccactttgggagaagtgatcatggaggcagccgagaacgcggtcaccaaaatgaaaaagcagaaatagtcagcaaatttaaccatacacgaggattgggaatgggagagataaaaagatgaagttaaaagcaggtttgtatatcggaattgcgatggtgctcattgttggaggttcacttttggctgttaaaggaaaggatgctgtaagtcaggccgagagccggaaacaaggcatacttgaggcagagcaaacgacattattttatcagaatagtcccgggacgattgcagaggcgggtgcgtctgaaggtgactctgtgaaagagggagaggtacttttcaaagtgaaatcagctggggagggagataaggaggtactcgcaccgtatgacggattggttgaccgagttaatgtagagaagggggatcaagtccaagcaggagtcccgctagcagttgtgcaaaagaatacgtattacaccgacctttacatacaggaaagtgaaattcaacagcttgaagtgaatcaaagcattgatgttcatttcccttatttggatcagccaacgcaggtgaaggggagcgttatttctatctcaactgctcctcagtttgcgaacttgcgtatgtcgcgggaaaaagggcaagccgatttaagtatgtttctggtccgaatatcgatggattcgaataccgatttgcttccggggatgacagcagaggtgaaaattgatgaaatcactgattgacgaatggaagtacgtcgcggacagtaagtatatacggctaatttttattgggccaatgattgcggccctattttttggattaatgttctcgcagaatcaacttaataaatcaccagttgtggttattgatgaggatcatagcgaatattcacggcaattgatctccaagataaatgcgtcacaatatatgagcgtcaaaagcgtatatgcgagccgaatgagtcctgaaacattgcttgccaacgagcaggctgtagcggtcattatgcttcccaatcagttgggattgcgtcaacaacaagggaaatcgacaaatatcggcatcttgatggataacacgatgccctcggggttaaccggtattcgcactgcgattcaggagatcatccagacagagaatatgaccctttccatgacacgtctgatccaaaaggggatggatgccgagacagctaaaggaatcgtgtcaccgttatcccttcagcaacggatgctgtttaatccaacctccagttatgtcggttttatggtgcttggatttgtaaatatcgtagtattgatgattacgacaagcgcagcgggctcaattgtaccccggcttcgtcaggaagggaaactgtttgtaaacggaaggtcacctttccagctatgggttcggagtgtaccttacactgtgttgagttcgctttcgctacttctatcctatggattattaaagcaggtggggggaatgcggtttgaagcagaggcttatctttttatcattccgttagttgtttatgcttttgccttgtcactcatgggtatgctgattggatacactgccaaagatatgtcgaaagtaagcctacgaaccagttttgtattgtatccctcctttttggctacgggaattcaattaacgccgctggcgttcccagaaccgttccaaatgttcgcatgggcattacccatgaactggcttaaccgtctgattcgtggaatggcgtttagggacggggcgctgacagcctacagtcaggagttgggggcattgctgattattattggcggagtgtccttgtttatgggattactgtttctgcgggaaacaaggaaagtttcttccagcagagcacccctgttgaatatggatatattgccgagcagtaattaattttttaagaatcgttaaacaacgaaaaaagacgcacgggagtcattcctgttgcgtctttctgttttcttttaaatctcattcgtgctcccatacggcgagctattttccatattcaaaaatggatcgtgataaagagggaaataccatagattgtttctcattaatcgtcatcattatatgatataatttctcactgagagtacagaaatggagagcaagaacggcttgatccagctactccatagctgcgcccatttgtgacctactgctcagatgaaaacttccaagggagcactggcttttaggatatagagctgcacgcagataaaattatatattgtgggagttgtctaacgaatcatgaataaaaaagaagtcgcgcatatacgcaagcagtttaaactcgatcacgatctactgaatatttacgatattctcaacgtgtatattacgaaggaaacgaatgaggtctatcactgggagcgtcacccgttcgaactggtggacagagagaagcaggagctgtacatgggcaatttcaaaaaattgctgacaggtgatttggatcagaagttgtttgagttgaagttccaggaagcggcggaggacccggcccaggtgctgcttcaccaggcgctggtaacaggtgatccggatgaatggcaggatctgatgctgctgctcgtggatcggatgttggtggatacgaagtttgagcgagatatggtagctacgttcgtgcgtggacagtattatctgccgaccaaggctagaaacgaagccacggaagagagtgagaagaacgaggtgttcgcccatccgttcattctgtgcagcgtgaattccacggagaagcagcggaagacgctcttgtttgattacgtggagagagagttcaaatacaacattattgtcgatccgattatcaaattaagcacgccagagcaaggattcctgtaccctagcgtaacggacaactactccgatgtgaatcgtgttctgtattgtacagggaaatccaatttcccggatccgcattttgttgaaaatgtattgaatggagaaagatccgttaccgcactggaagaacgggcgatcttcgaagatatcgtcaaggaagtggccggtgaacagctagattcagccaccattgcacatgtatatgaggagatcaaccgagtcatcgagattaacgaagagtcccatgaggaagaacctccgaagctggattataaagatctggaacgtgtactgaccgcaagcggtatagaggatctgacaacagagaaagtagaacgtgccttcgaaacgatcgtagacaacaagaactatgagatgaaggcaactagtgttatgccgaagttcacatcgaagtccattaagattgaaaccaaggttgctacaatttcggttagcccgcaagacctgagatatgtgaaacaggtgaattatcaaggcagacgttgcatcatgattgaagtggacgaagatgttgtgattgaaggctttacccttaatacagaaaaacttataaatgagtaattgattctagacattgatgatgtaaaatcatcctgcaaggacgaatgaacgtccatctatgttgaaaaaaagcccaagcctaaagcaacactgaactgctccctgtcatagtagaccgtagaagactacgatgggagcagttcattatcgccaaggcatgggcttttttgctgtttcatgactgtcgcagcagttgtttgatatctgttgccggactggagccaagctcctctttgagcaattcctccagcaccagatactgtcgctgcgcttcggttcttcgtccaagcgacagatacaacaggatgatctcgcgatgaatatcttcccgaatcgaatcaatctggaggatacgttcaaaataatacagcgcccttaacggctcgcctgccttcgcgtgatagtgggcagcggtctccatcgtcatgatgaaatccagctccagctgtctggaccacgcgaaagcccactcataatgccttcctttcagaagttcacccgtatacaacgtgtccatccgctcgaagagctcggggcgatgtgccgatgcctgacgcatctgtcggaacaaagcctcgaactcgtacagatcacagttaatcgcttcacggtcgatacggataccgtttctgtccttaagaatgataggcacgtcactgttatcaccgattgcacgtcgcacgtagtacagtgtggaattgatgttggtccaggctttctgcggactgaggtccttccacaacgtatcggccaaggcatcgcgagtagtcgatttggtatacagcaagaatgccagcaattcttccgtcttgggcgttctaagcttgatgggactgtctgctccggctccgccaaacacagtgaattcaccgaacagacgaacgttcagtttgggtccaggcaccgctggttcaggtgttatcacggacttgtgaagcttttcctgcaaccgtttgatactgcggttcagtcgctcagccgtgaccggcttgatgacgtaatcgatgacctctttgtcgaaagcttgcaccgcatattcctcatatcctgtcaccagcacgattggaagcaaaggatgatgtttacgcaattcaccaatgagttgcatacccgagatgcgaggcatcgtaatgtccagaaatgccgcatcgaagctattctctgccgcatattcacaggcttcctccgggtcatgaaacgcacgagatacctcgacttctccactttctgtcaaaatacgattcagtcgcttcagcgacaaatcctcatcgtccacgatgatgactttcatcttcatgtttcataacccccgttcccatctgtgcttagacgttgatttggaagatcaaatgtaatccgcgttccctcgccgtccagactttccatctgaaggtgtctgccatacagcaggttcaaccggctggaaatattccatagtccaacgccgttactgccgtccgtggattgccgaatttcgtccatccgttgcttggttatgccgattccgttgtcctcgatggtgaaacgtgtttccgtatcattcagattgcggatagacaacatgacccgaccaccgcgaatgctggacatcagcccatgccgaattgcgttttcgatcaggggctgtaacgtgagcggtggaatgtccatgttccggttcacatccgcatccacatcgataatgacctccaaccttgagccaaagcgggcttgctcaatcgctacgtatgcctcgatcatctccagttcgttcattaggctagtttttgagtccagatgtttaaagtgcacactccgtcgtaagtaactcgataattgcaaaatcaattgttctgcccgattcggcgcatccacgcacaattcggcaatggcattcagggcgttataaagaaagtgtgggttcatctgtgaccgcaaaaaagatatttccgcatctcgcgcagcttgcacggatgttttcatccgagtcaaaccgccgatccgtgccagcagttcctccgattcgaacggcttggatacaaaatcattggcgcctttctccaaggccaacttcaattgattggctttattactcgccgtcagcatgagtacaggcaactcggaaggagagaagcgctccctgatccgttccagcaattcgtaacccgacatgtcaggcatcatgatatcagcaatgacgagatgcacggcaggtagcttatccagcagctccagtaccgaaggtgagcgtgaagtgaccgcataactgtaaccttccagcttcaagagattcactattgtctgcaaattagccgagtcgtcatccacaatgatgatccattcgtctttattcccttgtacaatcgttggttcttcgaaccggagtagccaattaccgggacctgtaggagcgatggtaagtggcatgacgttggaacgtttctctcctttattctctgccagcggaaaggtcaggatgaacgtagcacccatgccgggtgctgaatccgcatgaatggttccgccgtgcatctcgaccagcttgcgcgtaatgctcagtcctagaccggtgcctccggcaacgactggccccgtatctgcttcctgctcgaacggcaggaagatatgttccagcttgtccgtaccgataccacgaccggtatccacaatgcgtatttccgctttgccttgcacaaccgcagctttgatgcttaccgtgccacgttccgtgaacttaacggcattgccgatcagattatgcaaaatctgaatcagtcgattgccgtctgcatagatcggcgggaaatgtgccgggatgcggttgataagctccacctgttttgtaccaagcaggaaggagtgcatacgcatgaccgattcgacaaacgagtacagatcggtcgaagaccggtggagcgggatgtcgccatgtttcattttcgaataatccagtaattcatcgaccagataggttaatcgtctgccacttcccgtcacgatcgccagattgtgcgcttgctcatcggtaaggggaccttctgcgcctttaagcaggctttcactgatgttgacaatggcgttcagcggtgttttgagctcatgcgaggtattggacaggaagtcatccttcactttgtccagcaagagcagctgatctttgagagtacggaccgtacgataggcctcgaagaaccgaagcaccgctagaaacagcatcaggatgctgaataggacaatggaagcctgtccgatgttcatattttccttgagcgagatcgagaagagattaatgtccagacagtacagcatgatgcttaagagagctgcgtaccacagaaaagtagacagccgttcgcccttctcactggttaggaattgttttgcacattgatacagcaaccagagcagcatcaacgtgtacataacgacgacgtaaggtgcagccagcccatagatggaaataggcaggagcgtgaccatacataagtaagctccgaagatgatcaggatcaccgccgtgagcaaaccggacaggatgcgtgttttgaatcggtagaagtaaaaggttaacagacccagacatgcgacggagcagaaatcttttaatttatagagcgtgctaaaggaaatttccgtgccggccatggataacacacgttcgctgatcatgccgttatagagtgcatacagcagacagattagaccaagcagcagcagggaatcgtccctgtttcggtagagcgcagaccccaggtaactgatgaggaatatgatcgaaatggtagccaatacagcaagcgtgccgaattcaacggctgtgctgatttgatgttttttcagcatggctgcttgttcgccgaaaaagagtggccccggaatgccagcgtccgtgtaatcataattagccacccggatcagaatctcaatgtcaccgccatgataagggaaaaagccaatcttgggggagtttcctggtcggtaacctgcggatttctccacggcatgcccatcttccagtagcttgttgccattgatatagatttcgctggcaaaacgaatgttcatttttttgatcgccagcgttccttcaacaggtgcattacgcagcaccagtcgatacgtggcgaagccgtgggttggcagtcgttcaccatccactttaagtcgattccaggagccgggaacggttgcataagtgtcgggtgctttcgttggaccagcctgattcgatgttgcagattcgtcaggaagcaatcgctcccagtaaaattcccactccccgtccagcttgatccgctcgtcttgttcagggtcccaagccgagaggtccagaacaccttgacgggcatgaagcgcagcagattgtggttctctgattgttgacaggagcagtacggtaacagcgactacaaccgtcaggacaacgcctgaaatttttaataacacgaaatgctgctcctttagagattgttcaatcctttggtagcttcggacaaaatctcttgtattctatcggcattgtagcgaatatctctggggggtgcaatcacatttcgacaaatttcttcatacccaccccgtgaattccaatatcgacgcttttgcagactgtgcttctgtatgagcgcctttgcgccaggctttgggtgattctcccatcagtttggcgaagcaacggttaaagctggagatggattggaagccgacctgctcagagatggacagaacggaggcctccgtgctttttaatcgcttgcacgcctcttcgacccgggtactattcagaaaatcgagcggtgtggttcccataatttcatggaacttgcggcgaaaatgcgttgtactcagatgacacagttcagcgaggtaatcgatggtcacaggcatcatatagtttttggtgataaactccagcacgggtgagatgaccaagttaccttggaggtctcgttcccgttcctgatcctgagatgacaagcgctcgctgctcgcatgaattcgaagcagttcgatatatagagacatcaacaagccgtacgcgctctcccgatagtagggggactgctgcttcatttcttctactactgatgttgcgagcatgtgaattttgggatgttgttctttattcaggatgcaattggtcccctgaatcgcccataaattcggttcaatgtgagtttgtgctgctttgagcgaatggcggaagagttcttccggtgaaaaaaagatataagcccacaggctggcgttattaggtgaactgtacgtggtatgcggaagatagcggggaatgaacgtgacatcgcctgctcgaaaaggcacagattctcccttaatctccatgattcctccatcggaataacagatgccaatctccatgtggttatggaaatgaagatgctcactcttgatatcggatattctccagcggtctccactgagtaacaggacaggaaaatcaatgggcaggctatagtgacgatattcaatgacaggtttcttcggtttaggcattttcgaggactcctatgtataaatgattgaaattgcacagttttgttgtgaatatgcttagattgagactattttactgcgtacaatggaataagtaaagcgtttacaaaaatggacggacacctctcagggtgcacttgggggcgtgtgcgcagggagaggggaataacaatgcttcaagtgaaatatgacagagaacagattctgaacgtaatcgagaacgttaccaagaaaacactggatatggatctgacatgggattggcccggcggtgtggcgtattacggtgtatccagagcctatcagacgacaggcaaccaagaaatactggacaggctggtgaaatgggcggacgaatatatcgagctgggtctgccaagttggactgtaaatacatgtgccatgggtcatgtgctcatcactttatatgaagaaaccggggatcagaaatattgggatattgttctcagcaaagtcgattatctccagaatcatgcgcttcgctttggagacaacgtgcttcagcatacagtatccgtttccaatgattttccggaacaggcttgggcggataccttgtttatggcggcatttttcctgctccgtgtaggtagcaaattaaaagacgaagccatgatccaggatgcgctgaatcagtattactggcatatcaaatacctgcaagatccgagcagcagtctgtggtatcacggttataaccatatcaacaaggaccacatgtccggattttactggggaagagcgaatgcttggggagcctataccatgtctcaggtgaaaccgcaattgaacgactggtacttgtatccgcaatgtatggatgtagagtgtgcccttcgcgatcagttggcggctctcaagctggtgcagaccgagaacggcttgtggcgtacggttttggatgacgaagaatcgtatgaagaggtgtcggcttccgcgggtattgcagcagccatgatcaataacggtaatccactgcatacgaaatatgtgcaaaaagcactggaaggtatcctgaacaacattagcgaagatgggcgtgtgcttggtgtatctggcggtacggcggtaatgaaggatcgggatggctatcgcaatattccaaaagactggattcagggctggggtcagggcctggcgctcgcttttctgtccgatatgttgagatagggagggaaccacattgtccaaaacaaccaaaggctcctttacactaccgggagaatccggttatgaagcactgacgctggaacttgccgatcgctggggtgccgatgtaatccgtgacagtgacggtacgaaattgtccgatgagattatcaatgccggatatggcatctattcaaccatttgcattattcgggatcataatgagtgggcatcccgtaatctggataaactgcagcaatgttttctcattacgaatccgaaggtcgctgtgcaagattatgtatccatctatctgatggaggacttcttcgctgaacaattcagggtgaatgattccaaagaagcgtttaaatattggcaggtttatgatcgaacgactggggaagaggtacctagaggacaatggaattatgaaagggaatctggcaatgttgtcattactggtgttgctccttggcataaatacacggtgagtttcatggtctatcggatatgggaagagatttccatgtacaatcatacgacgaataactgggataaagagcatctgatgcagattgacccgatctatacggaaacgcaaacgtatctactagattggatggaaacatggtgtcaaaaccatccggaaacaacggttgtacgttttacctccttattctataacttcgcctggatctggggcagtgatgaacggaatcgccatctgttctcggattggggttcatacgatttcacggtaagttcgagagcgctggatctgtttgctcagaaatttgggtattcactctcagccgaggactttgtgaatggcggtaaatatcaggtcactcatatgcctgcggatcagcgcaaactggactggatggcatttatcaatgattttgtcattgaattcggtaagaaattaattgatatggtgcacaaacataacaagctggcgtatgtcttctatgatgacagctgggtgggaatggagccgtacaatgatcgctttcaggagtttggattcgacggcatgatcaaatgtgtgttctccggttatgaggctagaatgtgctcaggcgttaaggctgatacccatgagattcgattgcatccctacttgtttccggttggcttaggcgggcttcctacctttaaggagggaggagaccctaccctggatgcgaagaaatactggattaatatccggcgtgcgctgctgcgtgagtcgattgaccggattggattgggtggatatttgcatctggttgagccttacccggactttgtggattatatcgagaagattgcccatgaattcagggaaatgaaagagctgcatcaggctggaaagccttatcagatcaaaacaaaggtagccgtgctgcatagctggggcaagttaagatcgtggaccttgtccggtcattttcatgaaacacatatgcatgatctgattcatgtgaatgaggccttagccgggttgcctgttgacgtgcagtttattgattttgatgatattcaacagggggcattgaaggatgtagatgtcgtcatcaatgccggctctgcaggttcagcatggagcggtggagcgcattggagtgaccacaagtctgtggacttattgacccaatgggtgtatgagggtggtacctttattggcattaaccagccttcggcaatggacgggtacgacagctattttagaatggcccacgtgcttggggtggatgaggatacaggcgccagagttgtccatggaaaatggtcgtatgaggttagtgatgagtatggtttggtgcctgagggggctagcatacttccgaaaaataacatttatcttactgatggatcagcagctgtagtgagtgaaacggatggtcagatcacactgtccacacatgcttttggaaaaggaaaagggatctacctgccttccttcgaattcagctgggaaaatacaaggctacttctgaatttgattcgatttgcgggcaatgaattccatgaaacaaagtacatcacggataacttgtatacggagtgcgcctactaccccgagagcaacatattggttgtgatcaataatagcaatcaggttcagtccacgacgatcaatacagagcatggaaaacagaccgtggaattggagccgtatgatacggtgatcaccaaaattggtttaacaaaatcggtatccccatagaatgatgactcgatagaccgtattccttaaccaggaagcggtctattttagttattagggcgtgtctgaaaacttcgaaggaagaagattttatcttacggatttcactgtatagtgttaatactatttagtagaatatttaaataaggatagggatcatgagccctaatattttattgttttcatctttttaaaggagagagtgccctaatgtacagttataaattgttggacacaataagcatggagacacttcacgaggcgtttgtggatgcgttctccgactaccaggttaaaatggatttgcctttttggaagtttcaacagatgcttcaacgaaggggttatcaccccgaaatatctatgggagcctttaaggatgagagaatggtcggatttgttatcaatggacttcgaagctggaatggaaagacaactgcatatgatcttgggacaggcgttgtaaaagattgcagacggcaaggcattacaagcaatctgctcttgaatattcaaaagctgttaaaagaaaaaaatgtagagcaatatttgctggaagtcatccaatccaacgaatctgcagttcagctgtacagtaaacaaaacttcaaaattcaaagggaattttcatgtttccagttgcaaaaagatcaattcataccgcaaacgacctgcacggtggaatgtgtggagagaatcgatgtagagcagtttaaggaattttgggatgtggagccctcctggcaaaattcaattgattccatctacgctgtaccggaggcttttatctatgtggtagcacgtcaggatcacagcattgttggttatggcattatagatcaaaaaacaggtgatattccccagcttgcagtgaaccaaaattaccggggcaaaggtattgcaagcagcatcctgacagagatggtccaacgcacagaatctcctagaatcagtgtcctcaatgtggagtctcatctgaaaccgatggaagatttcctcctggtcaaatcaggttttacatatcatgtgggccagtacgaaatgctcttgaaattataacgagatacccgtttcgacttaagatcagatcgggttcatacgaaaatatgtggggtgttagtgtctgtcttgttgggccagttgaacgggaggttgattaaaggcttcccggaaatcctggattgcagtatccaacccatcctgtactcgttataataatgttgatatatgacatggttagaggagacaaagacataacatgagccgaaagaaatactgtaagcgtattcagtttctggatgattggagtctcaaaaccaagttgtacatattgttcattttttgtgtgctgatcccggtcctggtcacaaataccgtgttttaccaaagcatcaaaggtaacattgaagagaaggagcatagccgattcaatgaaatgcagcaaaggatcaagttcaacctgcggaacagtatagacaatagcttgtatgtgtccaattttctctataccgatggaacgctgaaccggttcatggagttcaagtatcgcgatcaggaagactattactctgcctactatgatatgcttagcaacaacaatctggtcaggtactattacagctaccagcaggtgaatcaaattacgttttatgttggcaatgataccttcgtcaatggaggaaacttcattaagctggatgaagaggtgaagaaaagtgattggtatcaagcgctgatgaacacaagcgaccatatcatgatctattcgtattttgacaaacagcaggcggagatgtcgcaaagtcagggaggacgcaaagtaagcattattcgtaagctggattactttggggagcagcaggttgaaaaggtgttaaaggttgatctggactacgctttcatcaacaaatcgcttaaaaatgagggagccaatgggaaggtgtatgtcgtttcggatggcagggtcattttctcgaacgattcaaaaatgaatcagatgcgcaagccatttaatctgattgcaaacagttcaattgatcctgttcaatccatgcaatcgattcccgtcgtatccgaggattggcagattgtcgtcagcacggagaaattggacgttctgtcggagattgttaattccaagcttaatttgactttactaatcattcttaatctgttggtgccgacactgctaatttggttgatatccagatcactggtcatcagagttgatcggatagcaaagcacctggatcaagtgaagcatgagaaatttgaggtaatatcgggacctgtgggcaaagacgagatcggcagcctgacccatagttataacatgatggtcatcaagatcaagaacctgattgagattgtgtttaagggccaggtggagcggcaagcccttgagctctccaaaaagcaggcggagctgaaagcccttcagagtcaggtgaatccccatttcatgttcaacacgcttgaaacgatccgtatgcggagtttgatcaaggacgagcttgaaacctccgatgtcattcataaactggcactgctgttacgtcagacgatcaattggggcgatgatctgattacaatcgcagaggaaatcaattttgtagagagttatctgagtatccagcagtatcgctttggtgaaaagttgcaatttgcaatccggatcacagacgaatccattgctgccatgatgatacccaagctaaccgttctcacctttgtggagaatgcttgtatccatggtattgaggggacgtcgaatgatggggtcgtggaggtattattcgaaattcgaagtaatgagctgtacatttccattcgagataccggagtcggtatggatcaggacaagctggcctcgctccgcaaaatgatgcaagacccgagtatggatcggatgagcgagcttagcagcattggtatgatgaatgcatatattcggctgcggatgtattttgatgatttcgttcaggtgcacatattcagtgaaaaggggaagggaacaacgattggcattcaaattcctcttatgcaggcatctcaagaataaggagcgaggatatgatcaacgtgctgattgtggacgatgagccatttattcgccaaggacttctattgttaattgattgggagtcttacgggtttcagatttgcggtcaggcttccaatggcatgcaggcattggagtgcatacgcgctatgcagcccgatctggtgatttccgacattaagatgccggaaatggacggaatgcagcttgccaaaaccttgtacgagcaatataacggtgacatcaagctgattcttctaagtggattctatgagttcggatatgccaagcaggcgattaaataccaggtggatgactacattctcaagcctattgtgaagaccgaactggttcaggtgcttgaggagttcagggtcgcatttaatgcgcggacggaagagaagcgatatcagcaaaaaaaagatcgaattattatggctcagcatatgcagtcaatcttgcttggggtggctgaggaggatgctgttacgagtctgcagccccactatcaagatgtcggcatactgcgttgcatcctgattgaggcggaagccggtccagaacagggaacggattggtgcgctcgggttgaggcatgggtgggcaagcccttgccgggacaaattttgaaacccttcacaggtgataaaaatgcggttctgcttatggttacggacctgatggtgaaccgtgaggcagtgaccttggagcaatatttgacccgattacatgccgatctgagccatggtcaagaggcggctattgcttgttatgtcgggaaggaagtacatgagttggaggcgctgcacgagtcttatcaatcctgcggcataatgaaaagcttacgtttcttcaccacttgcaggcccatttattacttcgaacttatggatacgatcttatttgttaatcggccgggacagttcgaaaaacaattatttgatgggctagtcaagtctattgaggaacagcagacggatgagttatacagtcatgcaaaggccatttttcgattttttctggatgagcgaatcgagcctggtattgtccgcattcacttgcattatttggcatacacattgctggatctcgtgaataacgatacggttactccagattcggggttgatggaatcgacttttctgaaggtgaactacgcgatgttatccatggaggaaaacattgaacatttatgcgaattctcgctcatgtgcgcagagaaactgaaggagcagcaaaagtcaaatgcgatgggcgtattagccaaaatcgaggccttcattcacgagcattacagagaaaatatcagcctgaaattgcttggggagcagttttacatgaatagtgcatatctgggtcagattttcaaaaagcatttctcgatcagcttcagtgattatttgaatcaattgcgtattgaggaagccgcccggctgttgcgcagaacagatcaaagagtatacgaaatcgcaacaatggtgggatatcgggattccgattactttattagccggttcgagaaactcatgggggagactcctgcacaatatcgtaaaagtgcccatgctgcgtactctcttgattaacatcctgcactccttgaaggagcggcgggatattttttttcgcagatgctggaattagtgggattccatctatagtttatcccgttgagaggggcatggaagcatgataattttaagtcagcctttggaaagcgctttccaaaaagcttctgtcaatataatcgatggaggggtcatgatgaaaaaggatgttagaaaaagaatcaagtatagtgctctgctcgctttaatactggtcatcgcactcactggatgtacaccgggatcgtcctcgaaaggggaaaagacagcagatggaagggaattgaaacaattttccgcattttttgccgtaccgggaaaaattgcgcctgacgataatcgggtgttaaaggctattgaggagaaaacaggcgccagagtcacgatggactggcttacgggccaaacagccaaagagcggattggtgtactcattgcaggcggcgaatatcccgattttatcgatgggagtgatggtactcagcaactggtagcagcaggagcgttagtacctcttgaggattacatcgataaatatccaaacatcaaaaattacctgggcgaagactggaagaagatgaaaaatacgacggatggacatatctacttcattcctcaattcggcaatatacaagaaaagtcgatgaaagtatcccatgaaggagaagcattctggattcagaaggccgtactggagtgggataattatccgacaatcaaaacgcttgaccaatacttcgacttgattgaacggtataaaacagctcacccgaccgttgatggtcagccaaccattggatttgaaattatctcctatgactggcgttatttcgcactggagaaccctccgctcttcatggctggttatcctaacgaaggcgcagccatcgttgataaagaaacgctgacggccaaaaactataataccattccggaagcgaaggcatatttcaagaagatcaatgaggtatatcatcaaggtttggtcgataacgaaacctttacagcaaactatgatcaatatatctccaaaatttcaaccggacgtgtgctgggcatggtggatcaaggatggcagttccttgacgccgaggcatcactcgtgaagcaaaaattgtatgacaaaacctatgtaccgttgtccattacactctccgaggatgttaaagggcgttatcagaacaatccaatccttaacgtgaatggtggcctggccattacaaagagctgcgaggatatcgagggagcacttcaatatattaatgatttgctggaccctgagatggaggtattgagaacctggggacaggaaggcgtggattaccaagtagatgacaaaggcgtgttctccaggaatgaagagcaacgtgcgaattccaaagatccggactgggtgctggcaaacacgggaagcccgttggtctatttcccgcatcatgaaggcatgaccgctgacgggaaaaatgcccttgaccctaaggagcagccggaggagtatcttgctacattgaatgacatcgacaaaaaagtgctgaaggcttatggatatacgaagtttaccgacttccttgagcctgcggaggaaaatgaaccgtggttcccaatctatacctataattttgaaccgaataaaccggagaccatcgccagacagaaaatggacgatgtaaaacgcaaatggctgcccaaagtgattatgacttcaccagccgaatttgataaggcttgggaagaatatcaagccacgctcaaggaaagtgcagatattaaagcgtatgaagatgcgctgacggaagaagtccgcagacgtatggaactgtggggataaaggcctgtcacacagaaaggctatggggaaccccgtagcctttcttacacgctagattgggagattggataggaatggaatcgattcacccagactgggtgatatagataaactcgtaagcaaggagagaaaaacatggccaaaaaggagttgcagccttcgttaaaaaccagccatatcccagcgggaacaagctggatcgggtacaacctgtccagaatgaaaagtcagcgacaattaatgtggatgtcatttccgtttattgcgtttatcgctatttttgcgtatggaccattatggggctggttgatggcgtttcagaattatagaccgggcattggttttatggagcaggattgggtgggggtggatcattttcgaacgttattcacggaccctacatttttacgtgtcattcgcaatacgcttgcgatgagcctgatcagtctgttcctgggatttgtcggctcgattggtctggcgctcttattgaatgaactgcgaatggtattgttcaaacgcgtggtacagacggtttcctaccttccacatttcctatcgtggatcatcgtaacaggtattgttgcgaatgtattatcaacggaaacaggaatagtgaatgtgctgttgacgaaattgggcctgattgatgcaccgatcaatttttttgccgaacccaaatacttctgggggattgtaggtctgtccagcatgtggaaggaaattggctggggtacgattatttatctggcggccatggcgtcgattaatccgagcttgtacgaggcagcttccatcgacggagccggacggtttcgtaaaatgttcaatgtcacacttccaagcatcaaaccaacgattattatcctgcttatcatcaacgttggtaacgtactgaacgcaggttttgagattcaatacttgctggggaacggacttgtgcaggatgtatccgagacgatcgacatttttgttttgaaatacgggattaatctcggcaactactcacttgccaccgcagcaggcattttcaaaagtgtggtcagtctggtgctcatatttatcgccaacgggattgccaagtctcttggtgaagagcgattgatatgataagggggcagaactgtgaagcgatttagcagaaaacgaagcttgagtgactctattttttccatcaccaatggcatatttatgttgcttgtcatggttgttacgttatatccttttttaaacaccattgccgtatctttcaataacgggctggatacgatccgcggggggatctatctctggccgagggaatggacgctgcaaaattacgtctccgtattccaaaacccgaatctgacacaagccgcatttgtttcggtcgccagaactgtggtgggaacggttgtacagctgttctgtacagccatgctggcctatgtgctgagccgcaaggagtatatgttcaacaaattggtcacaacgctgtttgtcatgacgatgtatttcagcggtggtttaattccgggatacatgctgatcaaacaagtggggctgctgaacagcttctgggtatacattattcccgggttgatcggggtgttcaacatgatcgtcattcgtacctacattcagggactgtcggagggattgattgaatccgcgaagatggatggagccggagattttcggattttcatgcgtatcgtgcttcccctatccaagccggttctggctacggttgcactgtttattgctgtaggtcagtggaactcctggtttgactccatgttgtacacggcaggaaatcggaatttgaccaccttgcagtatgagctgatgaaattgttatcctctgcgacctcacaggggggaaccgtcaacgtggattcattcaaaaatgtaaccaacatggtgacgcctgtatccattcgggcagcaatcacggttgtgacggcaatgccgattgttttactgtatccgttcttgcaaaaatactttgtgactggactaaccattggaggggtaaaagaatgaagaatgcaaatcaaggcgaaaaatgcacgtataacaatccgattatgcccgggttttatccagatccatccgtatgccgggtgggtgaagatttttatctggtgacatcaacatttgcctattttcctggcgttccgatctttcagagccgtgatctagtgaattggaaacagattggcaatgtgctggaccgcccttcacagttaaatcttcagggagcaggccattcacaggggatattcgcaccaacgctccggtatcatgaaggcaccttctatatgattacaaccaatgtatcacatggcggcaattttgttgtaaccgctaccgacccggctgggccatggtctgatccttattttattgaaggcgcagaaggcatagaccctacgattttcttcgatgatggcaaagcgtattaccttggtacacgtccttgctccgagggagttcgttacaatgggaactgggaagtgtggctgcgggagttggatctgggcagtatgaagctggtgggagacagttacgttctgtggcgcggggcgatggtggatgtcatctggccggaaggcccgcatctgtataagatcgatgaatattactatttattgattgcagagggaggcacagggccaaaccatgcggtgaccattgctcgtagtaaaaatttgaccgaaggatacgtcgggaatccgaataatccaatcattacacatcgccatttgggtaaacgataccctgttgttaatgtaggacatgccgacttggtgcaggctgcgaacggtcaatggttcatggtcatgcttgcttcgcgtccatatggagggagctatagcaacctggggcgggagacgttccttgcttctgtcgtttgggaggacggatggcctgttgtcaatgagggccgcggaatcctggaggagcagggcacgttggatttgaagcctgttccggtagagccgcaactgcgttttgaccattttgacagtgataaactgggcttgcaatggatgttcctgcgcaatcctcaggaagatctctattcattaaccgaacgaaaaggatacttgcgactgaagctgaaaccgcaaacattgaaggaaaaagaaaattccagctttgtttgtctgcgtcaaaggcatatggattatgtcgcagctacagcgatggaatttgtgcccgggaatgccaacgaaacggctggtcttgtcgtcattcagaacgatctgtatcacgtacggattgagcgtgctctggcggataaacagcaggtgctgcgtgtggtgaccattatagatggtcaggatagccacattgcgcaaatcgcgctggagggtgatgtatcgcgggtgtatatcaaactggccgcaacaggtcagcaactaaacttctattacagcacagatggaagtcagtatcatctggtggcggaacaggtggatacaagcagcctgagcaccgaagtagccggcggttttgttggctgttgtatcggaatgtttagcagcagcaacggtatttcttccgatcaggtagcggactttgactggtttgaatatggttcatataaataatatttagatgatagaataacagaaagtaagctcaatccggtggcggtagtccagggattgagctttttttcgttctttttgccaaacggctatggggaggcgttacagtttattgtccagcttcatgtgctgagctttttatgatgttaaccattttacgctgagcatccctggcctccggaatcggatagaggacaaagacatggttcattttggggtaaacgtacgtttgatgatcgattctttgatccgtcagcagtttgtcgagcttcatattatcaggaaacaaaccctcgtgggttccgataaagatgctgattttgcccagaccggcgaaatctccgtagattggactgattaacggatcgtccaacggtttgtcagctgcccagatccgccggatgacatcatacccttccacagcgagcatagggtctcgggtctcgtaatcaaatatgaccggattgtccaacaccatatccacacaaggtgataacaagatgatatctttgggctgcgggagatcatgcatcttcagataatgggccaaggctagggatatgttcccacctgcggaatcccccataatggtgagttgtgccgggtcgtccacggaggcaagcagatcccggtatagattgagcagtttcggatatgtgtgctgatagttaaaatgaggaacctttggatagatgggagcaacaactttggcattcagggcctgagccatatggtccatgaatttccagtgtaaagacagcggctggtgtgtatgcgccccgccatgaatgtagagaatgactctctgttcacgggaatgctgatcgtttaaggtgaacacctgcatgtcttcatgggagcgctctttgatggaagatgacagttttgttttacccaagatataaggtttaatgttttccaagcccatatgatccaggtgtttgcgggtaagctcgcgtgttgaaaaaattttcttggtatctaacgttccgatatatttctcgaatagaaagctcgtcaacgagcgtttgtgattatggatatacatgttcattgaggaatcacccttcctgatggagttcagatatacggtctgtggagactataagtaaagtataaaggttgaagtgtacttcaaggtcaatcttaatttttccatcaaaccgttatggttagagtaaagcatggtacccgttctatgttatgatatttgcatcttcaaaagttcgattgaaggggcatagcgtatgaatcagagcatacaacagtttaaagcggattttttcaaagcattggcacacccgatgcggattcagattctggaactgctgagtgaaggagccaagaacgtgaatgaactgcaaagcattctgggatcggaaggctctgccgtttcacagcaactggctgtattgcgcagcaaaaacgttgtccagggaattaaagaagggacaaccgtcacctattcgctgcgtgatccgctgattaaggacctgctggcagtcaccaaacagatttttgacaatcatctggttgatgccatttccatgctggaagatattcgtaaagagtcctgacacaataaacaagagcaactgggtgtaagctccggaggttcttgtttttttgtgttaggttcctgctgggattgtgcgtaatccgattgacaagacgtatgcaggggagtagtcttttaaatatattcaaatattcaaatatatgaagaaaagaaggttttggtacatgaaatggatggggagatatgcagggtacaatgctgccgcttttcgcaaggatctgttatcaggactgattgtaggtatcattgcgattccactcggtatggcctttgccatcgcttccggggtcaaaccggagtatggattatataccacagtaatcgcagggattctcatttccttgctgggtgggtccaagttccagattggcgggccaacgggggcattcattccgatcctatttgccattgtgatgcagtatggatatgagaatctgctgatcgccggaatgatggccggtttgatgcttgtactaatgggcgtattcaagctcggggcattaattaagtttattccaaagccggtgactatcggttttacggcagggatcgccgtcattatttttagcggacaaattacgaactttctgggacttcgaggcatcgagaaacacgaggatttctggtccaatatgaaagaaatcgggatgcatatctcgacgattaatatatacagtgtgcttacagctggaatctgtctggctgttcttctgcttgtgcccaagtttgcaccaaaggtgcctgcatcactggtggggctggttctttcgacggtagtcgcggcgttcttttttgaagggcaggtggctacaattggttcgtcctttggcgccatacctaactctttgcctcagtttcatgtgcctgagatcacttggggacgtatcgtgaacttgctgcaacccgcttttgtcatcgccatgctgggtggaattgaatcgctgttatccgcagttgttgccgatggcatgactggaagtcggcataacagcaatcgagagttgattgggcaggggattgctaatatggtgacgccgctattcgggggtattcctgcaacaggagcgattgcacgtacagcaacaaatatcaaatccggcgcagtatcgccatggtctggcgtgattcacggtgtagtggttttgctggtacttgttctctttgcgccatatgcatcccacattcctcttgccagtatggccccctttctcatgctggttgcttggaatatgagtgaacgaagatccttcatacatgttatgaaaaccaaaacgagtgattcactcgttctgctgattacctttttgctgaccgtatttacaagtttaacaacggctgtagaggttgggttgattctggctgtccttttatttgttaaacggatgagtgagatgttgaaggttgccaaagtactgcccgatcccgatcataaacatgagaaagtcatggcccacatggttcaggaaggacatgactgtccgcaaataagcctgtatacaattgaagggccactgtttttcggcgcagcggatatgttcgagaagtcggtcatggattcgattcatcggcgaccaggcactctgctgttgcgaatgggtaaggtgccttttatggatacaacaggtgaatccaatctggcccgtgttgtcaaacatatggagagatcggggggcaggattttactttcaggcattcaggcgcaaccgttggagatgttgaagagaacaggtttgattgaacggattggtcccgatcatatgtttgagcacacgggtgaagccatcaattatgcattattgcatctggatgttcagaaatgcagggggtgcaaacattttgcctttcgtgaatgtgctgcattgtcgagcgctggcaccgacccagagtgtaataacctgctgatgagagatggagctataagagtctagagagtatttgcttatcaaaatatatattctggaaaataaacgaaaaatatactatgttataggttgataggtgaaaggattacatcgttcatcagatgagaaataatcatattaaaccgaaggagcaaccatatgtccattcaaccgactgctttacgttcagtgcttaaccccaggtacctggagtctacattgagtaatcaatatgacattggaacatgggaagaatgtttgttttggcttagaggattaaatgatacttaccgggttcgcacgtccagtggcatgtacattctccgtatctaccgcactgaaatcacggaggcagatgttcagtatgagctttcaatattgtctcaactcaagaacgttctaggttctgcggaacataccgacattggagaatacatcgagaagaaagatcatacgggatatacggtgttggaggctgcggaaggcaagcgggttgctgtgatgtttcggtatattgagggtacggagaacaacctggaggatgaggagtcttgttacgcctttggccaatctgccgctgaattgcatgaggctatggatcaggtgaacatggagctgccacgatatgagctggatctgaagttacttattgacgaacctcttgagcgaattattcactatatcggtgagaacaatgaagcagcagcatttctccatacgtttgccacaacattaaaagaacgcatcgttgccacttccaggcaagacctggactttggtctgtgccatggcgatatgcatgggaataacaatgtatttcaacaggaacatcagttcatccattatgacttcgagtgggcagccaaaggctggcgtgcctatgatttagctcaagtaaaagttcgaaaaagacagtctgatgagcgaaaagcagcattatgggatgcgctcatggcaggatatcgttcagtcagaagtttctctgccgaagatgagcaggcggttgatctctttattgttgctcgccgattttgggtgatgggactagatgttgcttttattgagagtgatacgggtgcgctggactatggtccggattggctggatagtttcgtggaagaattccgggatacggggattatatcctagcgaatgatgaacattattttaggtgtaggtttgaatgctttaagacccttccgagtcaacttaaactcgggagggtctttttcatcttatattgaaggtaacagggtcacttattaattcgatgatgatgaagaagcggcagcagccgatgctgcggcagttgcggccatggcggcctgctgggcgatgataatatttgtgatactggttgagattgctgtcgtaagcacaccgttccgcagattctccacatgttgaatggctaccagagcagacgagaacaggagcaactcctgtttgtcgattgaccaggcaccgaagcctttttgagtccgtaaccagtcatttgtttccgcgacttcatccactaatgagtctctgtccgaaggcagtagagaaagtatcccgagagatggtaacgtataagttttgtccattcgaaaatcccttttacgaaaagcttcatttaaagcaatcacacgagcacctgcatccgggggatcatctccaagaacaaggacatgtgttaacgcctgcacactatttctggaagagaactctggttttaattccccgtagagttgttccatgcgtgccacaccagtatctacgttgagatcggaaagggctaacatggcagcgaaaatgtagtcgtcctgtccagtgaggaaacgatgctctgctttcatgccgtcataaaataatttggcccgctctaccgtaggttgaaactggtcaggtgatgtctgagtagcgatctgataggcggcaataaccagataatcggagttacggaatttgatttctttcatcaagtcatagacatgcaaggtgtctgccagtcttgtctcttcatccgctgtaagggagagcatggtagcaatgctaatgaccgaattacctctgaatgcagagaaaagctttgtgttttgcttaatcaactcatggctttgacgaatagcttccccatccgctgttttattctccgctgcatagagcagggcagccagacgttgcatcatcgcatgttgccatttgaacgactccttgatgatctgggtattggaaacaaataaatcaactcgttctgcatgatgctgctgcataggcacacctccatattcactgttattctataatacccttccagcttccttcattctgtcggtgtaaacagattagatgattagaaatattaaatgaactaaagcgattattcccatagggtagatcaatgatctggagaacccgtttttaaattcatttcgaggatgtttttcgaaaaagaagtgtactacggtatgtatgatgaaaaagatatccagcacccaaaatgtaatggtctgatatgagctaaaaagaagagagaggatgatggtatacattggcaggtgaatccaagtgaaatacctataggctttatcatcttccatatcttttaacaccataaacaatttccactcggaccgcctgatggcatccatttcgtgaagcagaaagagagacaggttaaacaaaaataaaaccagtaaaaagtcaggcatgtaaagtctccttttcctattcaatctgttcctatcttactaaaggtaatttaatttggcaaaatatgaaaaaaagattcacgctccgttcatacgtgcttgatatgctctcgaaagaaagcgtaaggaacaggttttaaaaaatatgcggagtggtggggacaagtcatgtcatcgttgataagaaagatttttgggaaaatgattttactggtgttattgttaggcatgatattagaggcaactggattagggaccatgccactatcggcagcagtatccaatcagggattaaatccgggtaaattggagcaaggagtcgtagctaatctggaggatactgatcagttaacggcattcatggatgggatgatggatgtgcaaatgcgatctttacagattccaggcgcagtcatttcgattgtgaaggatgggaagatcctgctctccaaagggtacggacattccaacatcgaagaaaataaacccgttgatcccgaaaccagcttatttcgaattgcttcaacaacaaagctcttcacatggaccgccgtgatgcaattggttgaggcgggcaagcttgatcttgatacagacgtcaacacttatctgaaaacggtgaaaataccgaaaacctatgaggaaccgattacgttgcgccatctcatgacccataccgcagggttcgaggaaggcggtgttggttatcagattactaccgatccggggaaacttcccgtctctattgctgaaacgatggcaaaacatatgcctgcacgggttaagccaccaggcgagatgctgtcgtattccaattatggcgcctcactcgcgggacttatcgtcgaagaagtgagcggtgttgcctacaatgactatatacagaaaaatatctttgatccgctgggcatgaattatgctacggtagaggagcctgttccagcgtctctggaaccttatgccgcccttggatacgcccgagctaacggcgagtttgtaaccaaacggccaacgtatgagggaggatttcgtcctgcgggatcagggagcgtgtcggcgaacgatatggctcattttatgattgcccatcttcaagacgggcgatatgaagataaacaaatactcaagccggaaacagccaaactcatgcattctccggcattccagtttgatgaacgtttacccgccatggatctgggcttttacgagttgaatatgaatgggctacgtgtgatctctcatggaggggccgatgagctgtttaatacagccctttatcttgtaccggacaaaaaagtgggcatctttgtttcctatagtggaggggaaggcggaacggcagcagaagggttggcgcaagccttttttgaccgatactatcctgtacatgcaactaagcagcctaatgaaacttctattgaattcggggagtctctggaaaaatatgcaggctcctatcaatttacacgccgtaatcacacgaagatcgacaagtttttcagttttctgactcaaatcaatattgagttttcggataaccgactgtttattggaagtggtgcagatcagcaagtatatactccgattggggtgaatttattccaggaggtcggagggtcacatcagatggggttccgcaccgatgcagagggcaaggtcacgtatctgtttctggatatattaaacccaatgccgctggaacctgcaccgttaatgaaccaatcgaagttctggctcctcttgctgggcatttcggttgttctgttcatcactgtattgcatggatttgtttatcgcagacgcgaaatcagagtgatgccaaaagcgcaaaaatgggcagtccggttgtcagctattacgtctatatggggactattaaccttgggcgcaacacttctggtgttaaacatgaatctgattgatcggcttagccatattccactatctttacgtctctatctgtttatgccgattatccttgtagggttgactgctgcaatattcatcatgggcgtcctggcatggaaaaaccaatattggacgttattgaagcgtgtgcactatacgtttgtaatggtagcagcggtgatcttgagtttatttttctatcattggaacctgctgggctggcattttggttgaagacttcctcccaagtggaagaaacaagatagatatcggaggcatacatttgatatgaccaaaatcctagttgtggatgacgatgtgcatattcgtgagctgattaccttgtttttgcggaatgaaggattcgagattgtggtagctaaggacggagcggaagcactggagatcgtggggaaatccccaatcgatctggttatccttgatattatgatgccgcgattggatggttgggaattatgcagggagatccggcgtatggatctgaatatgccattgctaatggtcacggtaaaaggggaatcggcccagaaagtaaagggatttcagttgggaacagatgattatttaacgaagccctttgatccactagagcttgtaatgcgagtaaaagctttgctgaaacgttacctgattgtctcctcccagaccattcaactagggggcattatgctgaatcgacgcagctttcaagtaattcgtggagaggaaacaatcaatttgcctttaaaagagtttgaattgctgttcatgctggcaaaccagcctgggcagatttttacccgagaacagttaatcatcaagatctgggggagtgattacgaaggggatgaccggacagttgatgttcacatcaagcgactaagggaaaaattcgctggtgatgcacaccattttcagattgaaacggctcgtagtctgggctaccggttagtcatcacatgatcaaaaccttatatgttcgtattatttgcacgtttctggtcgtcattgttttcagcttgctgacctctttcttcatggggatcttccttttcaaaaaagaagtaaatcatatcggtcagaatgacatgatttctgtaggggaggaactgatccgtctatatgagcaaacgcaacctgaggacagggatgctttcatcaaaagtatggtgaaagtgtccacctatcccattcatctatatgacgtttcgggtaacgtaacctattatgacctagaccatacagagaccgttgaaatcgcaccagaagtggttcaaaaggtgttgcagggtcaggtctatcgttctcccggagaagtggagcagacgttcataggtcttccttttccatacaaaggggaaccacaagccatgtttatgcagtattctccgcagaatgaaaatatcattaatcggatggttttgctggtattattgcttgcactgttgatcggaagtttgtgtatccttattgctgcaaggtatttggtcaaaccgatccaggtgttgacgcgggcaaccaaacgactggcgaagggtgattttaatgtggaaatccaaacaaagcgcgtggacgaaatgggagcattgacgcagagtttcaatgaaatggcgagtgagcttaaacagctggaacagatgagacaggattttgtttccaatgtatctcacgagattcaaacgccgctgacctctatttccggttttgccatggcgttgaaaaacagcagcctggttgcggaggccgatcgtaactattacctcgatatcattattacggagagtggacgactatccagactaagtgataatctgctggagcttgcgtctctggattctgatcatcatccgttcgagacaaccacctataatcttgatgagcaaatcaggcaagtggtggtgacttgcgagcctcaatggtcagccaaaggcattccagttcatttagaattggcggacggtatcaaaataagggcagatcaggaccagcttaaccaagtgtggatgaatttactaggcaacagcattaagtttactcccgtgggtgggcgtatcgaaatacgcacgagccagtcggtagatggaatctttttcacgataaccgattcgggcattggaatagcgccagagcaactggattatgttttcgagcggttttataaaacagacctgtcacgcgatcgtagcatcagtggtaacggtctgggcctcgccatcgtcaaaaaaatcgtgatgcttcatcacggaactgtcgaaatgaaaagtcaggtgggcgtggggacaacggtgatggttcatttgccttccggatgattacaaaaatcaatttagagctgccaaagatatttttctggtagctcttttttgtatggatttttagatccctattccagtggcgataaatggaggatataaaatagtttaaaaataaatattttattgtttaatgcactaaaggatttcgcagaaaaatgtcgaataatgtctatcgataaggcattttcagttgatgggggtcgatatgaagcagcaatggtttggacggtatctcatttcataacgaggaaggaactgatgaatatcaacagttcagtgaacatgtacaagagagtcttaatcatgcttctatgctttatcttggttttagcaaatggattcttcgggagtcaatgggcgggggttgcagcagcagcggtgggtccaacaacagtaaccttctccacaactgatagtagtgcctgggctgatggaattgctgaagatggcgaaggttcttcaacgaatatctcaggtaaagtttttcaattctacaatattagtgataccagtagtggagctataatgtcggaacctctcagatatgcaaatacagtggaagatgggtggtttccttttctaactacttatgagactgacattaatattggttggaaagggatggggattagaacaagcgatgcatctgaattccaaattaacggattcttttattcaaactggggtgaaggaccaataaaccttacggttgaaggatatcgcgatggtgcaaaggttgcaacctactcattccaaaatgacgaagtaattgcagattatcattctaaacatgtttcattaaatgaagatttcgataatgtggatatggttctcttatattcagccgataagaacagttggcatggtattaatgacattgtgcttgatgatgctgtcctttctgcagtagaaccaacgatcaacacacagccagcgaatgagacggccaatgagggagcgagcagtccaacactgagcgtaggtgctacggtcagtgacgggggaacgctgagctacaagtggtatagcaacgtaacgaacagcacaataggtggcacgccaatcaatgctgcaacaggctcaacgtatgatgcgccaacgacgagtgcaggaacgacctactattatgtgatcgtgaccaacaccaacgatggtgtaaatggaacgaagaccgcaacgacgacgagcaatgcagcacaagtaacggtgaaagcgctggttcatgcagcagtaccaacgatcaacacacagccagcagatgagacagccaatgagggagcaagcagtccaacactgagcgtaggtgctacggtcagtgacgggggaatgctgagctaccagtggtacaccaacgcaaccaacagcacctcaggcggcacgccaatcaatgcagcaacaggctcaacatatgcagctccaacgacaagtgtaggaacgacctattattatgtaatcgtgaccaacaccaacaatggcgtaaatggaacaaagaccgcaacggcgaccagcaatgcggcacaagtgacggtgaatgcgctggttcatgcagcagcgccaacgatccatacacagccagcagatgaaacggccattttaggagcgagtagtccaacgctgagcttaggcgctacggtaagtgacggaggaatgctgagctaccagtggtacagcaacgcaaccaacagcacaacgggtggcacgccaatcaatgcggcaacgggctcaacgtatgatgcgccaacgacgagtacaggcacgacctactattatgtaatcgtgaccaacaccaacaatggcgtaaatggaaccaagacggcaacaacaacaagcaatgcggcacaagtaacggtgaatacgctggttcatgcagcagcgccaacgatcaacacacagccagcagatgagacagccaacgagggagcgagcagtccaacgctgagcgtaggcgctatagtcagtgacggaggcacgttgagctaccagtggtacagcaacacgaccaacaacactacaggcggtacgctgatcaatggggcaacgaatccaacgtatgccgcgccaacgacaagtgtgggaacgacctactattatgtgatcgtaaccaacaccaataatggtgtaaatggaacgatgaccgcaacaacgatgagcaatgttgctgtagttgccattcaaccagcactaacgtatatcattgagaatattgcggatcaaaccccagcagcactgattcagggctatgtctcgggtagtcaagaaacattaaccattaccgtgaaaaatatcggtacgggtacattgactaacttggaggtaacatctggtggggcgagcgggtcggatcttgaagtaacacaacctacagtgtcgactcttaaccatggggctgaaaccagcttcacggtgatggttaaggatggtttgccagcgggcacctacactgcgacggttcttgtaactgcggacaatatgctggaccagacattccaagttgttcaagctatcaacttgccaaatgcgcctgccaatcctcaggatctggtagtgatccctggagatcatcaggctcagctgaattggagtaacgtgccgggagcgacatattacgaagtttatttatcaacagtatctggtcaatttagcagtaacgccattaccaccgtaacggacgggaattatcgtgtggaaaatctgcttaatggaaccacttattactttatggtgaaagcaggcggattgggtggtttgagtgctgagtccaatgtggaaagtgcaactccattaacggttccagaagcaccatcatccgttatagcagtcgcggggaacggacaggctacgcttagctttaatcctccagcagacaatggaggaagtgccgtaacggcatatgaggtgaatgttctaccagacaatagagtcgtgactggaacacgtagcccaataatcatcacgggattaaccaacggaacgagctatacgtttacagtgaaggcaaagaacaaggcaggaggtagtgagtcttcgttactatccaatgcaatcatcccgttggtaccaacaggtaatggtggcaataccggtggtggaggaggaagtactggcggtattggaggtaatacgactccaagccagccacctacatcaggaactcaagttccgaacccaggaaattcaggggtggatgtaatggtcaacgggaaagtggaaaacatcggatcagcaacttcaagtgagcgaaatagtcaaagtgtaaccacaataacggtagattccgtgaaactggatgaaaagctctcggctgaaggaaatggggctacggtcaccattctgctaaatacacaatctgatgttgtcattggggaacttaatggtcagatgatcaagaacatggaggaaaaaaacgcaactctgaaaattcaaacgccttctgcgacctacacattaccttctcggcaaatcaatatccaagcgctgtccaatcaactggggcagtcaattaatctcaaagatattcagattcagattgagatttcgactcctggagcagagatgctgcgggtaataacagatgcgattgaaaaaaacagatttacgcttgttgccccaacatataattttgaagtacgcggcattagtggtaatcgtacgattaacattacccatttcaatgcatatgttgaacgaacgattgcgattcctgagggagtagatcctaaccgaatcacgacaggtatagtcatcgacacggatggatcagttcgtcacgtaccgactcaagtcattgttaatggtgccaaatattatgccaaagtgaacagtctgaccaatagtacttattctattatatggaatccaattgagtttcaggatgttcagaaccattgggctaaggcccaggtaaacgatatgggttcacgtatggtcatggatggaacgggaaaaggtatgtttactcctgatcgagatattacgcgagcagaattcgccacgatattggtacgcggtttgggactgaaactggatacatccaataatgttttctcggatgtatccaccgatgtttggtatagtagggcgatcaatacggcatatgactaccaattgctagatggcttcaaagatggaactttccgtcctgatgacaaaattacacgggagcaagccatgaacattatggcaagagccatggcaattacggggctaaaagttccatctggatcagctggtcttcagatgtatacagatgcagcagactcatcagtgtgggcatacagtggtatagctgaaagtgtacaagccggaattttttcagggagaagtgatgggaaacttgcgcccaaggcatatattacaagggctgaagtggctgcaatcgtctcgcggcttctccaaaaatcaggattgatctgattgtaataaactttaaggggttatcctaatcatgtccaataagggcgtgaggaggaggcccttttttgccatacaagagtcgtctccacccaacttcctcacattccttgttgtatttctgcggcacatctcgtacaatttggtgaagtaattctgcattgcgttaatgtgaatgtgaaaaggggagaatcgtttggaatcaaagcaactatctagagggctaaagccccgccatgtagagctgattgcactcggaggtacaatcggcgttggtttgttcatgggatcggcgagtacgatcaaatgggcagggccatccgtgttgctggcctatttactggccggtatcgttatcttttttgtcatgcgtattatgggtgaaatgttgattcaggagccggtcacgggttcgtttgcaacatttgctcacaaatatattagtccgcttgccggatttctgaccgcctggagctattggttcctgtgggttacggttggtatggcggaagttacggcgattggcatctatgtcgggtattggttcccggatattccacagtggctgcctgcacttgctggggtgctcatcattgcggcggcaaatctggcggctgtgaagttctatggagaatttgaattctggtttgcgatgatcaaagtgacggctattgtggcgatgatcgtgatcggaacaggactcattttcttcggctgggggaatgggggtcaggccattggtctgtcgaatctgttcagccatggtggcttcttccctggaggcatcaaaggtttcctcttcgcgctgtgtatcgtaacggctgcgtatcaaggggtggagatggtcggtattacagcaggcgaagcggagaatccgaaacacactttgcgtaaagcgatcaaaaatatcgtgtggcgtattcttattttctacgttggtgccatatttgttatcgtaaccctgtacccttggaacgaagtgggcgagacgggcagcccgtttgtgctcacctttgccaaagttggtattgttgctgcagcggggatcattaactttgtggtgctcacggcggccatgtcgggatgtaacagcgggatctacagtgcaggacggatgttatacacactggctgagaatgggcaggcacctgcctttttcaaaaagctgtccaaaggcggggttccccgcaacagtatcgtcattacaatctccttgctgctgataggggttgtgctgaactacctgatgccggactccaagctgttcctgtacatctacagtgcaagtgttcttccgggcatggttccatggttcgcgctggcgttcagccagttccgattcagaaagcgttggggcaacgagatggcggatcataacttcaagtccaaatggttcccgatcagcaattacattattattgtgtatctgatcctcgtcattatcggtatggcgtttaacccggatacgcgcttgcctctggttgttggagctacgtttatggcaatcgtggtggctggatatttcgcatttggcattggcaaaagacaacggatagatggcggcgaagatcgctagtccaatattcaaaaatcaacttatatcgtaatttcatacgtgcattccttgaatacaatggagaacctgcgggtgattcagcgtcattcaaggagtgcatttttttatccgcaaaattcatacttgaatctcctgtaactggaggttttaagattggagttataaagattgcactaaagcctatttacacttgccacttcgatgacagaacaaccttctgatcgctgttatcccctgattttttgattcaattttacaaaggtgaaaatctggggataaaggcgaacgcatccgcttcttcaggttatttctgtcctctacgttctcgtgtaaatgtttagttcaatctatataatagctgctgcgcaataatatcattccgatgtaatccgtggcaggatgggaggctttaagtatatgaggacagtagaatggatttatcttatttttaacctgcttatgttagtgggggtaatcgggattgggaaacagagtcaacattttcggaaaatggtatggggtggatttgccatatcaggtgtgctgctgatcatccatggtgtggtcgaaggacttcgttggccgatgattccggcgtatctgctcacgttggttccactggttgtgttatttacaaaggcaagacgccagcaacagtcaggtgtaacctcgctgaacagcaaaggttccgggtcatctgcttccacatcgactgtgacgaggaaattcggacgtgttcgaatcatcgcaacgtctcttctggtgttggtatacgctattgtgagcattggcttgccgctgctgttcccggtgttttcgtttgccaagccagcaggtccttatggaatcggaacggtatcctacgattggacagataacagccgtgaggagttgctgacgagttctgccggtgatcaacgggagctgatggtacagatctggtacccaacgaattcagacgcagagggcgcaacagctccttatgttaataagccggatatctatgcgacagccttcaatgaagtgctgaaactgccaaagcttttattttccagtctgagtcaggtcaaaacacatgcgatacaggaagctcagttgtctgaggccgaagccaagtatccggttgttctcttctctcatggtctgcatgggtatgaaaatcagaatacgttccagatcgagcagctggtcagtcaaggttacattgttgtaggcattaatcacacgtatagcagtctggtatccgtattcccggatggacgtgtggcgcagtttgaatcggaagggaaagaaggttttgagcagctacaattcagttacatggacaagttgaatgagacatgggtgaaggatgcactgtttgtactggatgaggtagagaagttgggtacgggagatccgagcggacgctttaccggacgtatggatctggacaatatcggcatgtttgggcattcatttggcggagcaacgacagtacagatgttaatggatgatccacgtgtgaaagcaggcatgaatatggacggtgtattgtttggcgagaaacgtatccctacggaaggcgtgggcaagccgttcctgatgatgagtgcagactcaaccgttgcaggtacaagtgtgatgagtgacgaagagattgctgcgatgggcacgacccgtccggaagccgagaaatattacgaggaagtgtatgagcgctatgagccggtaaccgcaggaggtaacttctggatggagctgaccaacaccaaacatctgagtttctccgacctctacctgatctctccactgctcgaatggacacagggtgtagaagcgcgggggacacaacaattggttaacgatacaacgattgatttcttcaaccactacttgaaagggaaaccgctccatatggacaaggaagtgggagaacatgaatcctatttgttgaaaaaaggctaaacgtataaatggaaggagactgaatttcagtcttcttccatttgttttaatcgtaaccgcatgccctcctgcaacaggttaatgccatctacaatctggctccattcgggattcatcagcttgcacagtttgttaaaacgcagaatgcgatccgtcacagagtccagcatatatcgggcctgtttgcgaaaaaatacttctggtgcttccgcatgctcagcacttgcatacatcaacacaaagtcccacaccatgctttgcacagcagggctatcgattgcccaacgtttgtccagcgcttcggtagtgcgaatgcgaattgcttccattttcttcacccagacgtctgcttcaacttgtggctgattcgccataatgaagaatggaacctccagctgagccagatcggcccaataggccggatcattgatcagttcctgaatttccttccaggccagtgtttgctgagccgtcagtttggtatctttcatcatgtatttatcgaaaaagtgcagaaacgacactctccaatcctgcggaatgctgtccagcagatgggattcatccaccttggcagcaacgaattgtttccgactgctcgcatgggccgttagggattcaaccagactggagatgtaggtaagagactgttccgaatgcagtgaagtgtcttcttcatgctgcttcgcttgctgcaaaatggagagcatggaattcatcgtgccgatctgggtttccaacgcttcaatctgcagatccagtgcctgtgctaccgccagttcacccgacatgagctttcgaatatccggtatgctgaaattcagataacgaagtgttgtaatgagttcgagttgccacaggtcttgcgttgtatagagccgatgcccaccttccgtatgattggagggttgtaacagttcaatctcatcgtaataacggatcgttttcaccgtggagccgatcagtttggctgcttcaccgatggaatagggttctttatttgggttcaacgagatcacctcatgttctattatacaatctccagttaggggagattcgatatgtgacgatcgtcagtgaattcgggcgggcttagtttaaattccacccatctcggttacaaaggaaagagtgcaacttttatgaaaattaaattcacaacaaataaaaaaatacgtttatacgatggttatcgtgtaaataaccaaggaggaaattgaacatggctaatcaagaccagcacaccatgcaagatccaacgacacaatatccgaaggctacaccggagtggaaacagcagcaggatgagccggggctccagcgtgagatgacacctgttcccgatgcgggtgagaaaagttataaaggcagcggacgtttaacaggacgcaaagcagttgtgaccggagccgacagcggaattggccgggcggcagcgattgcgtttgcccgtgaaggtgcagatgttgttctggcctatctgccggaagaggaagcagatgcgcaggaagttgtgaagctgattgaggaagccggtcgtaaagcaattacgatgccaggtgacctgaaggatgagaaatattgtgaagaactcattgaatctgcggtaaaagagcttggcgggattgatatccttgctaacgtggcaggtaaacagcagtttgtggagcagattgcggatctgactaccgagcaattcgatgcaacgttcaaaacaaatgtctattccatgttctggctctgcaaagcagctgtgaaacacatgaagccgggcagctccattatcaacacatcatcgattcaggcgtacaaaccttcgccaatcctgctggattatgcaacaacgaaggcatccattaacacgttcagcaaagcgctggcacaacaggtgggtagcaaagggatacgtgtcaacgttgttgcaccagggccggtatggacaccgctccaggtcgtgggtggacaaccagtcgagaagctagccgattttggctccaacacaccgcttggtcgagcaggacaacctgccgagatggctccggcatttgtgttcctggcaagccaggaatccagttatgtaagcggggagacattgaatgcgaatggtggtacggttagtccgtaaatagttttagataatccgatcagggtatcagaggatacggtctccatattgggggcggtatcctcttttttgtcgttaagatgaaagaaataaaatatttttataatgaaagcgttcttatataaaacggaaaaggtacatggtaatatattcaagaacaagatcttcactcccagctctgagagtgcgttgcttatacaatgaatctgttcagatcaatacactatgcctaggaatcgaaggaggaattctgtaatggccaagaatgtacttaaactaggtgaccctgtcataagcacgtacacatcatatgggacattaacatccgttatgaacgaagatttatggccatggattttcaataactttatacaaatcaggtatgcacatggatggggaattttttcgtttgattctcatcagtttctgctaagtacctgtccgggaatttccttttacaacctgccacaagaaattgtgattagcaaatggggaacatcacttaagcaagtgattacggaagcgatagatatgggatattatctatatatttatgcagatagatactatattgcgtgtacagactattatcaaaaagaacatctcatgcatgaattattagtgtatgggtatgacctggatcaaaatttgatatacattgctgataatcttgatgatggtaaattcatacaaagcgtatgtagtctggatgaacttgagaaaggctactggaccatgtctaatgagtacagtttttggacagaagtgagattcctcaagccaattcagaatatcaattatgcaattcatgtggagcagattataacggcgatggaaaactatcttaactcaagcgagacatatgacttagtgcgagatcagaaatacgattttggaatgcaagccattcaacgcatctttaccgacattgagcaggcagccctagttggagaagcattggattcacgagtctttcatctcttgtatgaacataagttacttatggagttacgtttatcttacttaatggagaaatcaatcattgaacgagattcaacctttatggaattaagcactattctgaaacaggactactttaaattgagaaatatagttctgaaatacaatataacgcgtgatgcaagtacactcagtaaaataagtgagagattgcaacagaatctcacaaaagagaaagcatttatttctacttttattaccagattgcaacaggttaaatcaatggcttgaagtcatctaataatagacaaaaaatcccctttgcttgttagaaagccaaggggattgctgtgtaattaaattacttttgttctggtttcgggtccagaatggcataactgcctagcgtggctaattgtgctgtgttcagaagcgcttcatccactgctgcgagggcttcgccggcagctgtcatcagctcatcagagtcaacaggtgaggcgaaacggagaatgacccggttctctccttttttgagttcactctcagccttggttttgtactcattaatggacgcgacttcgagatcattctgcacataataatcattggcatcgctctcgccattaaacatcgtgagctcggaatcaagccaataatcttgatccgctatcgttttctgacttgcagcagtctcatcattggcattgtacaggaaatacgggatgccggagttcgtcaggttgttggtggcatctacatggaaccattcgttcccgattttgaccttgttccatgcatgtggaacgccgctggaagcgcccgttacaacgatgctttccaatcccgagagatcggagagcaatttgtaaacggaagcatagctggcacataccccaactcctttgaccagaataccgtatgtggtaaacgagtcattaaactgtggatcgacatttttgaagttgttttgctccgcattttccagcgctgcatcgtcatacttcgcgttatcgttcagataatcgtagatggctttccgtttctcgtcttcgttcataccattcttgataatggaagccaccacttcgttcgctttggcaataatctcatcttgcttcttctggattccactagccgattcattgtaatgaatcgaaagggtaagtgtaccatagttgtattcgaaaccttccacaccaagaatcaatggattctggtacatcactttcaggacaacatctgagagtgtcgtgaaattttgagcttcggggaaagcctttaacgaaattttatcttgtgccgcaatcatgtttttggctaaaacttcttccaatgcggaatctgcattgatcattgcatcgcctgtagcaggctgaggcacggtttcctgattaccttgttctacattttgctgtgtattggatttctgctcatctaccaggttgtcttctacagcttctggagctgaagcaggtgtttcattggaagcttcttcagaagccatatctgaagaattatcagaagtatcatctaaagcctcagtagatagaggatcagttgcagcttctgacgttccagtatcggttgtagactctggagttgaagtttccgaagccggtgcttcttctgtttccgttgcagactcaggtgcatcatgattgttgatgatcgttggcacgtcaggtgcaggaatgtaaggtgtgtcattctttggttccaccagtccgttgctggaatcggctacggtttgctgagaaagtttgtccaaatctgcttgagttacattctctacgcgtacgtaacttttcaaagctgttcctttaatatgaaaaggaatattcgtttcattgaactctgaaatctctacgcttttggtatcatagacaatggtttcacgagctagagagccgtcattgtactcaactgttgctttctgaggaagtacatctatattctttaatttctccctatacaattgttctttcagagatgttggcaactgggaagcaagcggagctgtagggacacctctgctaaaattggattctttgcctccaccgattgcagtgacgtaatattctcctcgtataccgtggttctgagtggtagttatcatttcattataagtgccgagcccgccttttccgtctctcaaaaaatcattgaaagacgtctctgtcgttaccgcaatatctaaaggcagactattactgaacgcgtcctctgcgccagttagaggtacatttgtatcgaagttggttaggtcagaacgtttataaattttatattcggtggcaccttcaaccttgtcccagaccaacttgaaccgtctatctttgtcaatttcgtatcttaggttaggtacgggtaactccgatttcactgtaaacggaataatgatgggctgatcgagtagtgttagattttccgcatctggatcataattcagacgaatgtaataaatgggggcaccgccccaagaactttgatccttgttcatcatggaatctgaacttaaaacgccccatccaagaggcttaatggaaacactattgtcgtttgtctctggaatggcatatacatcgcttgctttgagtgctttaatatcggtatgtacactaataatgtcactagctcgcaggttacttttacgtaaatcggctttaaacttgaacataaattcttcatcctgagctacgttgtacatcggcatgatcgcttgttccgattcagagccgtatttctgcttcaaacttaaaatggtagaaccttctactacttctgtagggttattttcggacggactactctcctgttcagtactctggcatccagccagtaacagggtgagtgcaaacataatgaaaaatagacgtttcatgatacaccgctttcttgtttttctgagttgctctaatgctacgtttctacacaccgaaagattatcaaaattggttaaaacccatactcgaacctcttaacggccaaacctcctattaatttcctaatatcctttgctagtttatggtcatattgacgcattgtcaaggtgagagggtaggttttaagtcctgtagatcaatagaacagttgtaattccatagcggggggaccatgttaaaatacaagagttactacatatttatatatataacagttgaataattgaggaggctggattggcgtatgacagcagaacagattgtcagaaccttttttgaagaagtccgatcaggccgaaatcctgattatgcaagcagcgtgatggcggaacaagtactggctcatcaagtaatatccgaagctgaggtcacggtcacccgaacaccttccgattatacggatcatgtgcgagagatgatcgaagcttacggggaattttcactcgaaattctggagttgctgacgcaaggtgataaagtttatgttcgctggagacaaacgggtacccatattggcgaagtggacggatacagtccaaccaacctcccagtgattgaaattgccagtgcggtataccgagtggaaaacgaacaaattgcagagtattggatacagatcgacaggttgggcatcgagaaacaattggagcgtaatcggagctgagtttctcagctcttttttagttttcagttctttgtaagcgttcccgtgttataatgaacaaagttgtatacaagttacctaaaacgttttctgtcttttaactccataatctgaaagtgaggttcagtgatgattaaagcaacggaagataatcaatatgttgaactaacaagcccgacaagtttaccgaaggcatccggattcctttggaatgaaaagatgatgattcatgtgaattgccgggggtacgcggtggcccaattcatgcagcccgaacctgctaaatactcgtatgcgcccaacctggaagccaagacgtttatgcaaccggagcagccatactatgcccaccatccgggacggtttgtctacattaaagatgaagtaagtggcgaaatcttctccgccccgtatgaacccgttcgcaagcaggcggatagctatacgttcgctgtcggtaaacacgatattcattggaaagtgattcaggacgacatttgcatcgagatgtccctgcgtttgccgaaggaagatgtcatggagctgtggcgtgtgaaggtaaccaatctgtcttcgagaaaacgcaagtttagtatctacccgtattatacggtcggctatatgtcatggatgaaccagtccggttcgtatttggaagatttgcagggcattgtctgctcggcgattacgccgtatcagaaatatcaggattatagcaaaatcaaaaattacagcgacaaaacctatctgcttgcagatcaccaaccgactggctgggaagtaaatcatgagacttttgaaggcgaaggtggactacataatccttcggccctgcagtcggagacactggctggtggagatgcacggtacgagacacctgtagctgtattgcaatatagagtcgaactggaagcaggagcggagcaggcgtatcgattcatctttggtccggctcatgatgagacagagattgagggcattcgtcagcattattttgtgaagcagaatgaggaaggacaggatggtttcaccgcagccgagcaggagtatgctggttatattgcggaagggcaagggaacatccagattgagacaccggacagctggctagataatgtcgtgaatcattggttgcctcgccagatgtactatcatggcaaaaccaaccgtctgacaaccgatccgcagacgcggaattatttgcaagacaacatgggcatgagttatattcagccgcagattgcacgagctgcgttcttgaccgctttgtctcagcagcatataagcggcgcgatgccagacggcattattttgcacccggacgcagaactgaaatatattaaccaggttcctcatactgatcactgcatctggcttccggtctgtatgaagacctatttggatgaaacgaatgactatagcattttggaggaacaggttgcttttacagacagtgaacaaaaggtttccgtactggagcatatgaatcttgcgatgcgctggttgatccatgagcgtgatacgcgtgggttgaactatatcaatcagggtgactggtgtgatccgatgaacatggtgggatacaaaggcaaaggcgtatccggctggctgaccattgcgacggcatatgcgttcaatgtgtgggcagatattggtgaacaggcagggcatgccgaggttgcagcggaattccgtcaggaagccaatcagaccaacacggtagccaatgagtatctgtgggatggtaactggtacgcgcgcggaattacagatgataacgttgtgtttggcgtaagcaaagacgtggaaggacgcatctatatcaatcctcagagctgggcacttatgagcggtgctgcagatcaggagaaacaggagaagttaatccgtgccgtagaggagcaattggagacgccatatggtgtcgagaagctcgcgccgtctttcaccgcgatgcgggaagatgtaggccgtgttacgcagaaacatccgggaagtgcagagaatggtgcagtgtacaatcacgcggcggcgttctatatttacgcgttgtacctggtgggcgagaaggagaaggcgtatcgtttgctgcgtaaaatgattccgggtcctgatggcgaggatattctccagcggggtcagctacctgtatttattccgaattattatcgtggagcctatcggcaattcccacgtacagctgggcgctctagccatctattcaataccggcacggtgccttgggtgtatcgttgtctgatcgacggaatgtttggattgcagggtcatgcacaagggcttcaggttcgtccgcagttaccagaagattggaacgaggcatcggtaacgaggttgttccgcggggctgagctgcatgtaaacatgaaaaaggatgcaactgtccagcaaattgaggtgcatgttgacggtcaacggattgcaggcgacatcatcaagaatatacaggccggcgtgaaatatgaggtgctggtgaagctgcctttgtagaaaagcgcaaggagtaatgctgaacgatctgaagagttttggaaaattacgaagacaaattaaaaactgcctttcctttatagaaggagggcagtttttgctttcaagatgttgttttgaattgatacgtttgtcagactgaatatgatgaaagaatccacaagctaagcttgattagcaaacactctattctttgactctgtaccaataggtataaatctctgaataacccagcttggcgtaaagtttcaaggcaggtgcattattcgcaaccacttgcaggtaactggaggtagcgccctgtctttttgcccaatgcaatagatgcaagatcatctgttcagcaagtccccgattccggaagttagcgtctgttatgatgtcatacaatccaatgtagccacgttcgatgacaccaaacccacaagcgacgacttgcccatcgatcaacagcgagatgaaacctacctttgtccggatattgtccaacattaattccgtcgttccccgttgcagatcattcacctgatttagcctgcaaaaatgatccagccacgctgtggtcaactgttcgtcgatctgtacagtttggtgcacaggctctttgatctcttccagactccgagtctggatacgggtcagatcgacaacgccataccctttgtcttgcaaaagttggtcgagatgatccggctgaataaacggtgtgattttaaatatggtacttaactgattggaagcataaatacgctcacattcctcaatcttttcatgcacatccagagttgaatagtgtatgggttgaacggagttggcacgtttggtatatcctttggcaaaacgcagtacccatccgtcatataataaggtagacaagggttgccagtgattaagcgatagttcttcaatggttttgtgttctgaatctatggtatgcgtcatatccaacctccgattttatgattaaataataatacataattgtgtataaaaatacaataaaaacatatatatcgccgaacagtatgcattatggtcggagatggtatacaatttgattgaatgaataatttcagaagcggagcgcattatgttaactatagaattaaataatcacagcattaactgtcatatccaatacggcaaacggaagaaagtgtccatcacgatggacttgccttatatggtaacaatcaaagcacccaatggtaccagtgaagacatgatccggcaacttgtagagcagcacggggatgtaattttgaagaaatccgctctgatgcagcgggcgctcgatggtcctcaagccaaggaatacgaagatgagggcaaggggaagtttctgctttttggcaaggagcatgcactgcatgacttaatccctgtagagggtctgacagaagaagagctgcgagcgaatctgaagaagttttattttgccgagtgtaaacgtatgattggggagcgcatcggtcgctatcagcaggagttgaaggtgaagccgaagtcagtagagatcgtagattctcccaccaagtggggcagttgcagctgggacaaaaagcttacgttcaattatcgcctggctatggcaccactggaagtgatcgattatgtcatcattcatgaactgtgccatattcaccacatgaatcatgatcgctctttctggcggcgaatcggcagcatcatgccggattacaaaacaaaagaagattacctgatgcgaaatggtcgggccatgacactataataacaagcttaagccttcacttggacacgccatccccctccattattattcgtaaaatccgcgaagatcccattgtagcagtgagtggcttcgcggatttttattgtgtctggatattaggaataagatacttgaacgccgtaatgtttgaaaaaatgagtaaccgcatccatgtccattcgatcatcgaacagatgctcaggataatagatgcctggagccataggcttgtccgttggcatcatcagtatcttttcggcctgcactgcagcgccgagtgcagtcatatgggtctgaccaagtgggtcagagaccgtcatcgttcgttcaacctcattccctttcgcatccaatcctttcaattgaatgaccagatgatgtgcactcccagttcctggattatagagcaactttcgccggaatggcttgaaacgttcaccactgatcatcttccatactccggttttgaccaatccggcgagtgcataggtagatactttactatcgaatgcaatgcggaagctggttgaatcaatatgactggtatgaggtaatgtgacgtgatcgggtgtatccaatctgtaacatggagtcgtatacccgttcgggaaatgaactttgatcggatctgtcatgggatagacgagtcgatgtgtattggattcggatatctgaaaaggaatactcatccggtccatgaaggctgccgaatcagggccggccttatcccgcagcgaccatagggcatgaatgtttacttcgacatgttgcagagagttagaaagtatcatggcaaagagtgacgccgttcctgccatccatccagaggacagcactaccggagcatgaagctcttcctgctctattgtacggatcgcttgattgaacacctcagtccagcgtgttatatcgatgaggggaatttttctccgtacggccgacaccagtaatcgatcatccagatcgttcactgcattaatgattaacgatatattctctcctgcgtgaatcagtggatcgtctgcatgggtatcaacaacaaccgtttggacacgattggatggaaaaggtgctgctttacccgcagaacggcctcccagtaccaattccagatcaggatgcctgtcatgcaaaatgcgagcaagctgtgcacctacagcaccatagcccccagcgataagaactctttttctattcattcgataaacctccgttgatatgtttatgtacttatatgtttaaactaatgaacataatagagtgaagaaaaggaatgcggttcaccagcgcggtatgcgctagctctgacattccacttccacgagatgaacgagctgtttgagtaattcgatcgcatcgttgaactccagcttgtaatacatctccgtaccttttttctgaaccgataacagcccggattgacgtaatattttcaaatgatgagagaccgtagggcgtgacatggggacatgctctgcaatctgcgatacgttcatgctctcttgatcaatgagcagcgatatgattcgctggcgaacaggatctcccaatccttgaagatagggacttagattctcgaaaatatcaataactttttggttacccatcgactcgttcatggctcactccgttataatgtttaattgtttaaacgtattataaggcttagttcacttaaaaatcaaatttaacattccaagttgcaggaaaatagctgttccgcttgtccatttgaagtacaatataagcaaatatgcccgtaccacgaatccattgatgtatccgtggtggaaggagtccaagatggctgagagtaaccattattcggtgctggtagatgaatatatctcggagtttgcacctgatgtacaggtgagattacaggcaataagacagattattcgtgaagcggctccgaacgccgaagagaagatcagttacaagatgcctacgtatgcacagcatgggaatctggttcattttgccgcataccagcatcatattgggttttaccctgctcccaggggaattcaagctttccaggaggaactctccaagtataaagggggaaaggggtctgtccagtttccgctggatcagccattgcccgaggatctcattcgccggattgtggagtatcgcgtgaaagaaaatgtggagatcgcgttggaaaagaaacgcaaaaagggagcaccgaagtaattaaagctcctatcacaaaagctcatatcataaactataaaaaacagtcggatgcctatgcactccgactgtttttacttttagattttaagtttaacgttgctcgttacttcattttactttgttcgattcctatgctcttgctcacttctattcaaaggaatacgttacgtttgaattacttgctgtaggaatcaaatacataaagcttgggtccacttgcaagtagatcgtcaggtcggaaacgcccagattaggaacagtcagactgaaccgaccgttagcatccagcttcaccgtttccgtgcgaatatgtttttcgtcaggtgaaggaccgtggatctggaatgagaatgttttacctgcataagcagtgagtgttccccgtactttcagcgtacgatccgctgtatattcgaactgcatcagatgattatccaagtaatcctcgttcacgggttccggttcttgtggctctgttccagggtcttgtggttctgtcccaggattctgtggatcggttacaggttcttgtgaaggattgctaaccgagaagaaacgtgtctgatatgaaatttctgctttggacccgtctttctttttcaaaccggtaatgcgaacgttgaatgtatcgcctgccttcagggacttcaagttatccgggcgaaaaatgacagcgtagttatatccataaccatcggtatttacattgaaaaaggcctttgcaggatcactgctaaccggtgtttttgctcccagtacccaagttttctgatcggatgaacggacgatctccacctgtacttcggagttggaaggcttcgcaaagatgtccggattcaactgtgcagaccaggcttgtgacacattgaatgcttcaatcgggaatgcccctttattcggatacaagttgtaattgtaattgagttttcctgaacggctcgtatccataacttgcatggtgctaaaatggcttgcatagtttttgttgtcccgggatgcaattccgaatccgacctttttcagttgcgaactcaaaatccagcggcgatggccgagtgcagcaatgttacttgcgtccgaatcatccatataggctttaacactttggactgcaagatttccttgtgtaccataggaagcgtacagattggagcttgaagccgatttggctcccagatcaaaaaagtcttttggcatatctgcaggacgagttgggaaatgagtcaattctccggtagagacaacaactgctccatgctgggcttgacgattaagcgcagggtccagaacgagatctccatccaaaccggagagataacgatagaagttggctgcacctagagcctgctctaatgtggtgttacttactacaccagcgacgtaaggtgccttggtagagggtttctgagtgaacgttgcagtttggttcttgccactcatccattgtgtccatttctggctgatttcttgttcacttcgctcaggcagcagactgtcgacaggggccgcagcgatctgctgagttccgagcagcataaacaatagacctgcgagaggaagagagagtaacgagcggatgtaccttttttgaataaacatgttctaatctccttctagtaaaaaaatattattatgtattcgatgtattttatcgacattaaaggtataattcgttagtttcatgaatgcaattgtttattcgaattcagcgatttttcagccagagccattataatactcacggaatcctgtaatcgaaaaggagtttttgcatgtctaaggtgctgcataagtcgttttatctcattttgctcgtgtttgttgcggtgtttattgcttcgtccttgttggttcgggcacagtacaactacgccttgtatggggacaatcctattttgggcatgcagcagtggagtatttttctcccggtcattcttttgcttcttggttcaggtgtcgggttatatgcgctatgtctgaagctgaacaaatacagtccgaaggttgtcattccgattgtgctgctaagttctttggccattcagatcatcatcatttttgtatttccgagagtacccaccgatgattcacagaccgttctctcactcgccatgaacatgctgtatgaccaagactactcgtcgtttgaaccgggtggttatctgcagatgttcccgtttaactactcgatcgtcttgtacctgaagacattgctgtacctgttcccggacaactatctggtcatcaaactatttaatattttgttttcaacgttaacaacgttcatgatttatcttatctacaaacaagtgaacgacagatccacggaacgtgattacggtgtgttgatctttgcagcaacgtacctgccttccttgttcctgaacaacctgatctataacgatgtaattgccacagcttttctgacatcgtgtttatactttgttattcgttttgtacgtgaaaagtcttggaaaacaatcgttattgccgccgtttttctcgcgatgggcaattacttccgaagcattggcgtgattgtgctgatcgctgccatcatatatatcctgctgaatttacggagcattggaatgaagaaagtcatcatttccatcggtgtgctgggtatgttgtttaatgtaccaacctggacacagaatgcggttcttcaatcctcctctgttgtgagcgaatctgtcggagagaatgctgcaccggtctatatgtggctgaatatgggcattaatctggagcgttttggcttctgggacaatatggagagttatcagatctatcagaggcaggccaactacaataaggctgagagcgcagcattgttcaaacaagagatcggcaacaagctgtctgaagcaagtgcaagtgacttggtgcagatgtattacaaaaagattatatggacctggaccgaaggaacgtaccagatggaccgctacggaatcggcaatgaaagttccatgggtgccggaagaggaaggggaggcggaatcgcaggctcctacagttacaccaatgcgataacagaactgttacaaggggattcggcttatcggacaggtttgctctggatcgtatatgtgatgaatttcttgatgtactgttttatttccatccggttggttggtggaatttgtcgtaaacggtatgatgaagtctccttaatcctggtcattctcggattcatcggattttatattctgtgggagattaagtcgagatacatctaccctgtatatccgttgttggttgtgctgtcctatatgggtttcaaagatacgtatgacttcatattccatcgtaaaggtaccttggagagatattccctgagaaaaaggtgatcatatgcgaaaaaataaatattttacatcggttacgctactcctactgctgggatgttcggttatgctaacggcttgcgatgtgataaccgctcagaatattaccaagaccagttctgcgcaaggcatgaacggtggcggtatgccgaatggtggtggcctgggaatgaatggaggaacaccgagaggtggaagaggcaccgcgggcatgaatgatcgatcaggcagtcctggcatgacgcaggggatgatgaatgccaacattactggtagagtcatctccgtgaatggaaacacagttacgctggcgttacttgaggtgcaggacaactcatccccaagcatggagtggaaggataccggaatggaaatgaagttgaatataggtgatgatgttgttatcactgaaggcatggggacgccgggttcgggcaattccagcccacgtgcgaattcgtctattcaagtgtctgatcttcaaaaagaaaacatcgtgatggtgtggtataaggacaacaccgagacggttgaacgggtgatggttgtccagtaaaaaatgatgggattatcgtcattttgtaattgcttacatttggcttatcggctattatggtaacaactggttttttgaagggagtgagcgtcatgaaacgacggtctaagatggtatgttccattactacaatgaaggtaagcataaactgaataattccggcagaccattcagatgcagggtggaaacatccagtttcccagtccgatctgagatctgctgatatatagggatataactgctcattttttctggcgtatgcgagttttatttgcttgtgcaaatttctcatacactcagatttttaaaagccgcaggcatagcctgcggctttttgcgcgcaaaaataggcattcgttgcccacaagcaatgcacatgaaacgaccaaaaaggagaaatgcccatgttaaaattaaaaaatttatttcaacataatgatcttgccgagatggtcctgaagaattggaactatgatcctgagtcgctggacatgtttaagtattatcgcatatcctccaatgccgtgtatccgttcagagatcagggggaagtgagattgcttcgttttgccccggtagaggagaaaaatcaaatcaatcttggcgctgaactggagttcctgcgttatcttcaaacgaatcattatggagctatggaggcggtaccttcccattcagggacagaactcatagaggctcacaccccatggggaacatactatgcttccgtattcaagcgagtacccggatcgcagttaggaagtattgatttgaatgacaccatcctgtacagctatggtcaggcgttgggtgagctacatcatttatcacgtacattcatgcctgagcaaaaggagaaacgctggacctacacggatgttttggattggatgatgcaggagatcctgaagggttttcctggtgaaacggctgctttgaatgaggtggagtttcttcgaacgtattttgcgactttaccgatgacccagcaaaatttcggtctcatccactacgattttgaactggacaatgtcttctatgatgaaggtagccagtcttgttatgccattgattttgatgattcgatgtatcactggtacgcaatggacgtggaacagagtctggatagtttacgtgaggagatcgagtctgaacaatgggagcagaagaaacaattgttcctgaacgggtattggtccaaggcgggagaacgttatgatctggagagtatgttccccgcttgtcgccgttttgccaacttgcacggttatgtgcgtatgcttcgatctgttgcagagcagtggtcacatgagccggagtggatgagcggactaagagcgaggttaacgaggataatgacagaaaaggcagagcaattcggaaaggcagtcgacagctaagattggttccaattcaccctaggctagtcaagatccatgagcactgaagttggaagaatcattcacgtaaattggtcccgcggtcagatgcagatcctctgtatcgatcacggggcttttcattttgttcgaacattaccgaataatgaaacggaagtggaaatcttgtagaaaggttggatgggactttcattctttctacgctgaaaatggtaatttaatgtcggattatatgaaaaaatgttaaaaaaacaaataaaatagttattgattaaatttgggtgggatgataagttgtaattaacttattttaggataaattatatataaaggagaattagatgggaaatgtatgtgtcgatctgcatcctttaacagagcatcaacaaagaatatggtacatggaaatgttatatccgaaatcagatgtatggatgattacatctaagatgagcataccggaaccgatcgatttcaccttgttagagcggtcgattaacagggttttgaagaataacgaactgcttcgaactcggattatactggatcaaggtgagaataaacaatacatccaaccttatgagtacagatcactcaagcatattcatgaagatccagccttgacgggtgtgacatggactgagtatgtgggcaaccatccgattcatgtacacagtgaagatctatgtcagttttatacgtatgagggtcatggacaatacggatacatcattcaggttcaccatatcatctgtgatggcctgggattattccagttgacgaatgagattacggcaacctatcatgccgaactgaaagatggtaatgcaagcaggattgaatctacgattcacgattatgaatactatataaatagtgaacaacaatatctcgcttccaaacgctatgtgaaagatcaggccttttggagagagaagtttcatacgattcccgaatttatggaactgaaagcgcacaatccccttctaactcacaccgcagccagaagaaaaacgatgaatatggatcactccatgtatgtacgtttgaaagatttctgtcgtcagaagaatgtcagcgtatttaccttttttctctcaactctagctattctgctgaataaactcactcaccaaaccgatttggtcgttggaaccaactacgcgaaccgtactagtaaaacagataaagacatgattggcatgtttgtcacaaccatacctgtcaggatcggggtagtaccctctgaaaccgtgttaaccttgctgcaacgcatttccaatgaacaaaaagaaatattgcgtcatcagaaatatccgtataatcagctgatccgtgatctgagagagtcgctctccttaccggaactgaacagactgttcggcatatcactggtctatcgtccagaacgctttgacaagatgcaaggacatgatgtctatatggacaacaagtttaacggacatgagacgaatgatctgcttatcaacattattgaaaaaatcaatgaggatcgtatcatatttcagatggattatcggacccagttgttcagtgaatcgttcatggacaatctgctcgatcagtttcttacggttacggaagccattctggagcattctgaacaaagaattgaacaggtcagtattgtaagcgaagccgataaacaatcgatgctaaccgagtttaatgataccggggcgtcttatcctagcgaaaaaacggtcatccagttgtttgaagaacaggcagctgctacccctcaacatacagcacttatcctgggggataaggagatgaactatgaacaattgaatgccagagctaacggcttggctacgacattgatcagcagaggaatcaagcaacgagaactggtaggcattattgcaacccacagtatggagatggttatcgcgattctggctgttataaaagccggatgtgcttacattccgattgatcccgagtatcccgatgagcgaattcatcatattttgaaagactctcaggtaaggttcgtcctggttaacaagcttgttcatttgccggacggtctagaagtcattgacttgattgaagaaaatgatggatatataccaacagataatctgaacttgaccatagatgtgaaggatctggcttatgtcatctacacatcaggatcaactggagcaccgaagggtgtattggtggagcataagggattgacgaactatatatggtgggcgagtcagacctatgttactgacaggaaaacgactttttcactgtattcatccatcgcgtttgatctgaccattacctccatcttcacaccgttaattacgggcaacacgatgattatctacaactcgtctcataacaaggcattgattactgatgttgtcctagatccgcgagtggatctggtcaagctgacgccggctcatctgcaattgattcaggatatgaacattatggacagatccaatgtccggacatttattgtgggcggcgataatctgagtgcttcattggctgcgaatattacccggcaaagcaaacatgaggttaccattttcaatgaatatggaccgacagagacagtggtgggctgtatgatctatacttacaatcctcatgttgaccaaacggagtatgtgcctatcggaaagcccattcagaacacatccatatatgtgcttgatcaatcactgcaatacgttcctgtcggtgttcagggtgaattattggttgggggagacggagtgaccagaggctatctgaaccaacccgaattgacgggcagaaaatacgtcgaacacccggatcatccaggcgagagattgtaccggacaggtgatctatgccggttaagggaagatggtcagatggaatacctcggaagaatggatgaccaagtgaagattcgcgggtatcgaattgaactgggtgaggtcaaggcagctttcttgaagatcaaaggaatccgagatgttgctgtaagcgtcaagacggatcagcaatcccgtcagttatgtgctcattacgtcagcgatgcacatgtgacccggaggatgatacgggataatctggtatctctgttgccggagtatatggttcccacacatctgatcaaggtgtcttcgattccacttaccattaacggcaagattgattacttggcgttatcgatagagaagccacaatcggatgaagaaaatgtgtatgtggcaccgaatactgtcatggaacagacgatatctaccatctggtctgagattcttggtctggaagaggtgggtgtgacggatcacttctacgaacggggtggtgattcccttaagttgattcagatctacacaaggctttccgagataggttttgatttttcgattaacgatatgtttaatttccctacaatccaatccttaagttcatatctggatcaggtcatggaagaaaaggaaggcatgatgagcatggaacaaaacacaataaagagatccaaaatggaagtattgaacggaataatggacaagccgatcttcctgtcaacagatattccccgagttgatccggcgctcaaaggtgtaatgtcattcaaccaggaatccctgtggctggttgaacagttcgaggggaagagcaccaaatataatattcccggacatgtcctttttgaaggcgcattctcggaagaggcatacatctatgcattgaatcagattgtgcagcggcatgatgtattgagaacgtattttgttgtagaaaacaatacacccgtgcagcgaatcaggccttacgagccttttggcattgaggtccagcatacgctgagggataattcccaagccagtctgaagcgtgtaattgaagaagaatccaaacaccagttcaacctggaaaccgggccgatgtattattttggattgtatcggatccatgcacatcaatattttgcctattttaattttcatcacattatcttcgatggctggtctcaggatattctgatggctgaactggggtcatactataatgcttatctgaggggagaaaatgcagcaactgagaatttgagtatccaatattccgactattcacattggcaaaagaataaatggatgactgccgaatttccgacagttctgaattattggcgcaaccagttgggaagtaccgttaaccgatcggtgaaagtattgccgtatgaccgggagccttcgctgaataatggggataccggagatattctgctctcagaaattccgatccaaaccattgaaatgatcaaaaaggccggtatgaaaaacaatgccagtctgtacattaccatgctcaccgcctacaaaatgttgctgtacttttactcgggtgaaaccgagatcgtcgtgggaacacctgtagcaaaccgtaatcgtgccgaagtgcagagattgatcggatatttctccaacagtcttgctttgaagacgaccatggaccccgagcagtccatagacgcccagattgtttccgttagaaatacggtgtttgaagcgtttgatcatcaggagatgcctttcggcaagctgattgaactgctgaacccggatcgtgcttccgggctgaccccgttcttccagacatggttcgtacttgatgtcaaaaatacgtacaacatcgaagggctgaatattgctcagaatgaaattttgtggggccacagtggcaagagcaagtgggatctgacgttgaatctcatcgaggctgactatgtcatgaatgcagtagttgaatacaaaacagagttgtttggcaaatccaccatgaagagatttctgcatgattatatggctgtagtgaagctgattgcagctgattcctcacggagtcttcaagctgtacgccatgattgggaggtgatggcccacgagtacaagatggagttgctgaatagcagtaagagcaaaaagaaattcaacaaaatcaaatcttaggaggaataactatgaagaagaaatttgataaaggtgcgcagatggtcatccagaaagaaattgtgaagcaatcgtttctggaggaaggtcaggaactgccgttggtaatcaaacccaatgtatccggtctggatctgaaacaatggtatctcaacaataaggatatggtggaagagaaaattttgaaatatggtggcgtcctgttcagaggttttgatactaccacaccagaaagcttttatggtttcatcgatgtaagctgccccgaaccgctcagttataaagaaggagcgacaccgagaacccaagtacagggcaaggtgtatacgtcaacggaatttccgaacgaggaatccattgcaccgcataatgaactgtcctacgtcatgacatggcccaaaaaaatctggttctccagtatcgttgtcgctgatgaaggaggagaaacacctattgtggatgtacggaaagtatataacctcattgatccggacattcgggatgtttttgcagagaaaggctggatgttggttcgaaactacggaactggattcggacagacctggcagtatgttttccacacggagtccaaggacgaggtcgagcaatattgcctggacaacaacatggcttgccaatggaacgaggatggaacattgacaacgaagcaggtgagaccggccattacgatccaccccgatacaaatgagaacctgtggttcaatcatattgccttctggcatagcagtagcctgaacgaggaagttcgcaacttgatgctcgaagaatttggagagagcggcttgccataccagacgtattatggagacggaacttcaattgatgccgatgtggctgcccacattcgtcaggcttatgccgatgctacgattgcgtttccttggcaagagggagatattcttatgctggacaatatgttggtggcgcatgcacggaacccgtatcagggagatcgaaaagtactggtagctatgggagaacccgtgagtcgctaagcctcaattgcgcctgaaggaaattacattcgaacttaaaatacattagaaatgcaggaggattgaacatggaaaatgtaatgctgggttatcccctttcaccacaacagaaacgactgcatgaactgaataataacggattaacatcactggtcccaagtgtaattgctgttaacatcgaaggtgagtgctccaatgatcagattgaattagccgtgaagagaatagccgagaaatacagcacactccgcacttccatagaagccgatcccaattatggggtccatcttcagaaagtagattcggagaccagaagccgattccgtactgcatattccgatgaaccgattcaggagcaggatatccaagggttgatccgaaaggagttggacacatggacaggtgattattcgctggaggccattaacgtggatctgtccgaacgttccaaagtgttgattctcgcttttgatccacagttctcggatattgaacctgccgttattctagcggatttatcacaattaatcgtggccgaggtggactctgaacttttggaagaagaggtaccgtactatgctgtatccgagtggttgaatgacctgttgaccaatgatgagcatgcggaggaaagaagtttttggaacaataaacggtttgatcatgttgataaacaattgtccatggtatccggtggcggaaccacgagtattacgatggcaagtttctctgtggaagggtcaccagaattgtgggctgaacttgagaaggtagcggagaaggctggaagtacaatagataacgttacgctcgcctgttggaatctgactttgcatctgctgggcgaggataaggaactaacggttggcgtacatacgcgtggccgacaagatgaggatttggagaaggttgtcggtgcattgaatcgatacgtacctctgtactcgggattaaaagaggacgacacgctgactcagtttttccaaagaacgacgagtgaagcgaaagatagtgcagaatatgcagattattttgacttcaaaatgtttagcaaatcggattcgagtcaatctgtgttctcctatggattcgagagtcgggatgcatcatccgtggtggaatcgggtggtcacacgttccgggttgtgtatcagtcggaacagattgaatcggttcaccttggactcaatatccagcaataccctgaacgcagagatatcgttcttcgatataacgaggaaaagtacactccgacagagattggctacgtagcggatatattcacacatatttgcaacaaggcctatgtgaatctggatgaacccgtatcgtccaatatcatccctgatcatctgacatttacattgcaatcgattcttcaaggagaggttcgggaatatgcaacctctacattggtggagatgctggacgaacaagccttgaagacaccagatcaggttgcggttgtgtccggtaacactctgcttacgttccgggaaatccatgagaagtccaaacagcttgcccactatctgcatcggacaagaagtgtcgggcatggagatgtagtcggggtaagcgtggagagatctcctgagctggtcatagccctactgtcggtgcttcgagcaggggcggcttatgtaccacttgatccggattatccgaatgagcgattgtcctatatccgtgagaatgcccgcattgaaacggtgctgttgttgaataaaaacaatgaacggctcaattccctttttgctaatcctgtatttcttgaagaagaaggtgaggcaattgcgaccgagcccacggacgcaccggcaatcggagtagatgccagagacatcgcctatatcctctatacttccggttccacaggtagacccaaaggggtcaaagtgtcacatcaggccatcagcaaccatatgcattggatgaacaatgaatttccactgagcggggaagacgctgtattgcagaaaacatcgattaatttcgatgcatcggtatgggaattctatgcaccgctcactacgggcgcaaggctggttcttgctgagccggacaagcatgctgatcccgactatttgctcgatattattcataaggaacgaattacgacattacaggttgtacctaccatgcttcaggctttggtggaaaaagaaaccctctcttcagcaccgttaaaaagggtgttcagcggcggagagagactgggaattccgctccagaaggctttctttgctggttccaacgctcagttgattaacttgtacggcccaactgaggcgagtattgatacgacttatcatatctgtgacaaggataacgttcatgaaacgatcggcagaccgattcataatacgaatctgcttgtgctggactcgaaccttaatcttgtcccgccaggtgttgccggagagttatacatcagcggaaaaggacttgcagatggatatgtagatgaacacttaaatgaccaggctttcctggcacattcttatgcgccggacaacgtgatgtacagaaccggagacagggtccgttatttcccggatggtcatatcgaatacattggtagggttgaccggcaggtgaagttaagaggttaccggatcgaactcggtgagatcgagaaagttctgaatgaacatcctcgtgtgcgacttgcagcggcgaagttgttagagaagacagaaccattgctggctgcctatgtagaactggataccgctggagagattcaggatgtcaaacagtggatttcatccgcacttcccgaatatatgattccgaacgtcatccaagtgctggagcatttaccgcagctgagcaatgggaaaattgattaccacgccctgccggacgtggatgtaagttccggggcggaatatgccgcaccaacgacaaccgttgagcagattgtcgcccagatctggagagcggtattgaagcgggagcagattagtattgatgagaatttctttgcactcggaggacattcgcttatcgcaacgcaggtcatctctggaatcagacaacaggtaggtgttaatctaccgctacgtaaaatatttgatgcgcctaccattcgtgaattgtccgaagtgattgagaatctgttattggaagcgaatggttattctgcggagggtaattaagtgaaaaaatccggtgcagtaataaacaaaagtgaactgattgatcgattattaagtcagatgaatgtttccaaaacagtagaacgcacttctcgggaaatcaaccgatttcccttatcttttgctcagaagagattgtggcttcagcaacagattgagccgggaagtatggcatacaacatggtttttgccaatgagattagaggagagttcgatgagtcggcatttgagcaagccatcggactgatggtggacaggcaagagttactgcagattcggattgattccgaagagggtgtaccttatcagtatattttgaaagaacaaccggattatcaatgggttgatctatcgatgtatccggaagatcaggccgaaagtcagattgtcgatggaattgaaagggccgatggcccttttgattttactcgggacagactgtgcagattcaaatcatttaagcttagtgatcaccgccacatttttgtcctgatgatgcatcatatcatctcggatggtcagtcaatcgagatcatacgaagagacctgttatcttattatgaacatttccgcggagtgggcccattgccgctatataacccatccgcgacccaatatatagactattcggtatggcaaaatcaattgttggaaagtaaagagtttgctgctcagaagaggtactggcttgatcagctgaaagaacactcctatacgctcactttgccatatgaccatgaacgtccgcagaaacggagtgaagaggggatatccgtatacttcacgatacctgcatctcttaccagcagattaaggaaaatatcggagaaaaatcattccacgctatttatggtgatgtatacctgttttgcgattttgttacgtaagtattcgggtgaaacggatctgctgatcggtacgcctgtctccaatcggccacagtccgatttggagaagatagttggtttctttgtcaatacactcgtactgcgaagccgtattgatgatcagcaatcatttctggaccaccttgacgcttccaaaaataccatccttgatgcatttgaccatcaggatgtaccgattgatctgttgtttgatgacctgatccaatctagaaccacaggatattcgccattgtttcaggtcatgttcagtctggggaaagcggaccattttgaacagaaagatcaacaggctgtgttcagggagatcaagctgaagcagatcaacacatccaaattcgacatgtcactggacttgacggaagatcgggatgtgattaagggtacgtttgaatgtagtcgggatcttttccacgtgagtacgatcgaacgctgggccagtaattttatagcgttgcttgagcatattgtggattatccagggaagccaatcgcaggggttggagccgttagtgatgaagaacgacagaaagttctatatgaatggaacgataccgtaatggattaccctgatcatatctgtgtacatcatctgttcgaagcatccgtatctcaagccccggatcaagtggctgtggtgtatgggggagaacaattatcttatcgcgatctggaccgtcaagcgaatcaattggctcatcttctgatcgaaaagggaattggacctgacaaggcggtagccattggcatagaacgttcactgcatttgcctattgcccttcttgctgtgttaaaagcgggaggagccatcgtgcctctggatctggatgcacctgtggagcgaaatcgtcacatgttaacagattcgggagcgtccatctgtctcatcaatacgaatacgttgccgatcccggatgatgttgcccttctgatcgacgtatctcaatctgaaatatatatggacaagccgataacagttccctcgacacaagtggggcctgatcatctggtagctatttattatacgtcaggcactacagggaaacccaaaggggtatctgtgcggcaccagggatgggtgaaccgtatctgctggatgcagcaccaattcaagctggaatcccatgaaacagtacttcagaaaacaactctgacctttgatgatgtcggtcttgaatatttctggacatggatggcaggtgctagggttgccctgttggaaccaggatttcatcgtgatccgtatgcgatcattcaagctttgaagcaatatgaagtggccatcgtcttttttgttccgagcatgttgaagatgattttggagcgaattagtgtggcggatctggagcagttagcgtcattaagggatgtattctccagtggggaggcattgaaacccgaaatggttgcagcgttccaccacaatcttcccgagcgtaatctgcataacagttatggggtaaccgaggtttccattgattcgaccattcatatgaatgtgcagttggaaggtctccgcgcacgaagaaatatatccattggtcggccaatcgggaacaattttatatatgttctggatgaaatgcagaatccggtgccgatcggggttcacggctatttgtatattggtggtgttgggctggctaggggttactatggagatcccgtaaagaccggacaggctttctttgcaaacccgtttacggatggaaggatatacaggacgggcgacattgcttattacgacgccactggcaagttatacattgtcggtcgaatagacaaccaattgaagattagaggcatgcgtgtagaattgggggaaatcacggatgtaatctccagacatgctgatattcaggagtgtgcgatgctggctgagagatggggagatgatgaagaactgtcactgagtgcttatattcagctggctccatcttctgagattctcagtacggaccttcgcaacttttgccgaaccctgctgccaagtcacatgattccttcacgtttcattactattgatcgtattcccctgaacagtaacggtaagttggacaaggcagcgctgaagcagctggaccgtggcacattgaaggattatatcgctgctccgcaggatgagctggaagaaaaggtcatgcagatcttcatggatatccttggtgtagacaccatccatcttcatgaaagctttttcgatcagggtggacattcgatcaaagccgtccgtttaatggatgttctgaacagaacatttcataccgagctatccgtgatcaccttgtttgattactccactgtcactgagatcgcgcgaatcattcgggaaggaaatcttccccaagatcaatcgattgttgtattgaaagaaggagaacgtgcggatgaaataccgttgttcctcattcctacgggtggcggcaatcttatcaattattatgagttggttagccaactggaaggtctgaatatatacggatttgtgccaagaggatatgaaaatgacgaagagcctctctataccgtccaggaactggccgagtattattacgatgttcttacgcaattgcatccgataggcccgtaccgattactgggttggtcctttggtggcaatgtggcatttgagatggcacggatcattgaagatgcaggacaacagctggagtggctgattattctggatgcacctgcccgaagccatgagcgggatgttcgtccaataaacaagatggaggctcttgccgaattagcaaacaacaacggatatgagttcgtgcctagcggagactatgagattcagttaaaggaagtcatgcatcactttccagatgatggaagacttggacacctcaaagtgcgtctggccaatgaagtggcctttgataactactattcagcagaaccgattcagtccgatatccatctgttgtacgcaaccgctcaggatgaacaaagtccagttccgttaacggatgcacaggtctggcacgccaagacgacaggtacatgcacttcaactcctattccaggtcatcatgagaatctgatcgactacaatcatgctgtgaatgtggcccaatatgtgaatcaaatggtgaagggatggatcagataacttttgaaacgatggaatccaatgtgagaagttattgcagacatttcccggccgtatctgataaagccaaagatgaccgactctatatggagtgaggaaatattgaagcagtaccccaacattgatattcggggaattggtctgatctgggggctggatttctccaaattcgaaccggatattgccgcagaggtacagaaggcttgctatgagcgtggacttattgtagagcgagtaggcagacccgatagcgtggttaaggtcatgcctccattgaacatctccaatcacaatctgcgaagaggaatcgatatcctcagggaaagcattgcttcggtgttgacgttgcaagaggagaaagttgtgcaaaagatttaactttggatgcatcttcctgcttcatattgaagagaacatcagattggaccaagcggagcattaatgacttcgcttgtcttcattcttcatagcagcatgaaagagatgtggaatgagttttaggttcgacgtaagcggaggtgggccatggagattttcaaaaacaagaacttcagtttgatgttttttggcagaatcttgaccaacatcggagatagcttatatgcggtatccgccatgtggctggtctacaatctgggaggatcctcattttatacaggactcgcgggttttttgtccattttgccgaaaattattcaactgttatccggaccgatgatagatcggatcccgattcgagggattctggtatatagtcaattaattcaggccggattgttattaattgtccctattgctgcgtactatgattttctgagtgtaggcctggtattggtgatcacccctattctgaacatatgtaatacctgggtgtaccctgttcagatgtcagctctgccaagagtattggagaaacaccaactcacgcagggcaattccttgttctccatcgcttatcaggggattgatgtggcttgtaatgccatctccgggatcctcattgttgcgctgggtgcggtatctttgtatttttggaatgccatcggtttcttcataggtgcgttattattctcccaattgcggattgctccttatatcatggaatcgaaaatgaagaaggaacagggtacatatgatgagactattgaaccagctaacgggagtgcaccgtcaggcatgcgtttgttttttaggaattacacggatgatttagtaagtgggatcaggctgcttacacggacggcattggccaaattgctctttggcattatggttatcaatgctgcgggaggagcgacatttagtgtacttcccatatatagtgatgagatcggtggagccgatatctacgggttgatgctgatggcacaggcgctcggcagcgtcattggtgcaacatgtgcaccgtatctcagactggaaaatgtgcgtttgggtcggttgtattctgtggcatacatcatctccgggatcgcttggatcgggtgtatatttaccccatggagctggctgagcattctggtatacggactggcctgggttcccggcggagccgttaacgtcatcatcaataccgttgtgcagaagggggtgccgcagcaatatttgggtttggttttctccgcgacgatggctttaagcggtatagctatgccaataggcagcttgatcggcggtacgttgggggtctggctacagagttctacagtcattaccttatgtggaattaccgttgttttggtaggtgtatactggatgttcgatcgcgtatcccgcaacctccccaagacggagcaactggatgaaggatatttcaattttacaccacgtggcggcacggctcgctcgaatactgaaatgggggcttaacactgtagcataatgagaccgtcgttcatctctaaatttcatatgtataaaaataaaaaaggcacctcagaagggtatgaggataacgattggttatcccgtgcctgttccatgaggtgccctgttcaggttcattcatgttaaaccatgttaaacgctacctgagcaatggaatattgcaggttaattgttgttactcggtataatcacttatcgcagtacgccccgcttctacactgatccagtaggaataatcttcgcgcacgtccacatagaggttaagttcctttgcatcaaggttacttaccgttagtttgaaattgccataggcatctgttgtaacctgctgcgtctggatgtgctctacagcaggcgaaggaccatgaattttgatcggcatcgtctggttggcatacgccgggaacgtaccttgaagaaccagtgtgtgatcggcggaatatactgctttcatggtctgatccggtagtccgccgttcttttcattctcggtagcttcagtggcattcttcggccagctccatagttcgaagccttcttccttcaggttctggagaaaaacaacggcctctgcccgggtcaaggattcttgtcccgcataaccttgcaccgtagctgcagttttgccggaagagtatcccatgttcagtagataccggatggcatcttcatcctgggtataatttttaccgccaagccccgccacgattacggctacttctgttcggttcaaggcatgattacgcagcttaggattctgtttgctggcattcagtttcagattcaacgcggaagcataggtataataacggtcactccagatgtttcctttgatagcttgtccctctacagcatctatgctctgaatgacatgggaattcgcatacagcttgaacaacatggagaggaattcggcttcactcacctgattgttgggtttgaacgttccatcctcgtatccactgaccatctcctgttgaacggcccattgaatggcatctttcgcccaatgtgtacggacatcagttaattggggaattcccgttaccgtaacagagacaaccgcttctttcccttcaaaacgaatccgaatttcggctttaccagcctgcagcccaatgatttttccatccttgatgacaatgcgatctgacgtcgtggtgaaggaaacgttagactgtggaacataggatgttccgttatcattcacggcagtgattgaaggcagatcaatctgttctcctgctcggactttcaggtttggttgtcctggcgttatgcgggtaagcgttgtatcttgaacaccgtccacatggaagaaacgtgtggagtatgagatttccgctgctgtaccgtttttcttttgcagacctgtaattcgaatgttgaacgtatcgccgttttttaacaattgcacatcgtcgggacggaatatgatggcgtaaccatatccatatccacctgtctctacattgaaataggcttgattaaaccattgtttatccgcagggtccacgttgtaataaccggttggaaagccactgttctgattctttgcattaaaggtccatgtacgttgatcggaagtccgagtcatctcgacctgtacctcagatagtgatggtttcgcaaatacatctgtattcagttgaacagaccaggcctgtgtactgccaaaggcttcgattggaaaagctccctgattcgggaacaggctgtagttgaacgaagttccccccgttctgcttttatcaaatacctgcatggcactatagtactgatcatatgtcttgcctgcttcactacgagtggcgagtccaaatccgattcgttgcagttgtggactcaaaatccagcgccgatgacccaatcgatcaatattggaggcatctgaatcattcatataggcttgaatactttttgtcaggacgttattcttggcactgctggtaacgtacagattggagctgctggcagactttgaaccgatgtcaaagaaatcctttggcatatctcctggctgttttggataatgggacaggtttccacccgtggagaccacaacagccccatgctgggcttggcgattcaatgtcgggtcaagcacaagatcgccctgtagccccgtgataaaacgataaaagttggctgcgttcagcccttgttccagataggcgtcacttaccacaccagcagagtaaggagcacttgtcgaaggtgtctttgtatacaggggagatgtatcattgccattcatccactgattccacttttggacaatctcctgctgacttcgctcaggtaacaaactgtcgacctgttccgcatgtgccgcttgagcaccccataacagaaacagcaaacctgccaagggcagagtgaacagtgaatgtattttatttttccggtaaaccatgtttccaacccctctcatatctgaacgtacgaagaacatatgcatgttcagcattatggtatattcatcgacattacagctgattttgcttagagccaggcatgagagcataaggccgagcatgtgaaggaggatattttaattagggagttggtggttcatttgttaaaaaaagagcacaggccaccccgctgattggggacagcttatgctctttctacatatgtatctactttttagtcgagactcaggtcgaaatcaggctcacacatataatctaatgggtacagatcatctcgtgccgagattaatgcacggaaatgcagataaagattattgggctgtaccacaatgccaccaacacgatgggacataagttcagccacgacgaagacatcctcggcattgttacatttaaaaagaacatttttcggatgaatgacttcctccaggtaactgtacgtcatcacgtgaaatgtttgtccgcgccagtttgtcttgattactttataggactgtgtgcgaaccagatccagataacgttccagctggaacgtatgttcaaattgcgtaatataaccttttttatctacatcaatggtaaattcgacatcatagctctcatgcatttcatctttataagttccgttcataaccttcatgttgtcaaagtgtaatccgaattccggatcatccacatagggaatggtaatgagttcggggtcaacataatctgtgatcttactgttactggaaggtggggtgtaatacttcgatggctgaagatcaatcgatccaatcatgcttccaggaaaaccggggctgcaagttattcgcatattcatctccttagttgttggtcagtagttagacgaacgactagggagaaagttgcaccagaataaggaaatgaaggacgggaagaacccagtatgtctatctcccaacatcgagcaggaacgaatggtaggtaaatattcttttaagtcatgaatcgcacgtctacttctgttcctgctactttcatatgaccagtagcaccggcgctatttccaatcgttctgctcttttgataaagtatctgtaggacataacggagatacatatcaactatgagacaacatgaatgggtcatggagaaccgtgccccgtatcgctctcggagaggagtccatctaatgaatgtgaatgataatgtgatcgaacaacagtcccttacctttgtgggcatcaaacgaacgttctcttgtgtgggtggagagaatttaagagaaattcctaagatgtggcaggatgctttggcagacggcattgaggaacttttaaacgggttcaataacggagctattcccggtctggtgggcatctgtgtagatcagagagagctgaaggacaatcaaatggagtattggattgctacctctcactcaggtgaagtgcctgaagatttggtgtccatcgaacttcccgcgtcccattgggttgtatttgaagcggatgaattaaagccggaggcgatacaacggttgtggcaccatattatggcagagtggtttccttccactacatataagcatgcagggattccggaacttgaagtgtacagaggtcacggcacacctccccaagtctggatacctgtggttgttcaaaaagtccgtttttgattacgaaggatgcctggaggcatcatcagcatcgaatatggcattcagccgaaatgtccgttgctcacgtattttccctacgttccgctactccatttctgccttcatcccatcttcttggtactgaaaaccgctttttttgaacatgtattatgaacaaaattggattaggaggtctgcgatgttatcccataaagtgattgatcattgccaggagcaaggctggtggcatgaagatattccagcagcctacgaagaagcattgcggaagcttgaaattgatcttcaatcggatttcgcacaattttatctacatgcagaggatggaccaactttctacagcaggcatcaggagttgtatcagatctgctggtttatggagaacaccgtatatatggaagacatggatgtagcacagcttacactgggacttcccgaggcgtatattccactggacagttttgaaggtgaaggtggatttttctacaaccgtcagacgggagaagtggtactggtggaactgggtgaatcgattgaacggtttcttaatggcgagagtgagccgcagtgggctgatttcaatgcttttctggagtggtatttcgttctggaggaggagacggtgcaatgaaagatctgacaccggaacatgccgaactggagcgacaaattgtagaaacggtagaagccggtaatgtgctggatgagacgcaacaacatgaccaagcacttatctattatgatcaggcatggggcatgttgcccgagccgaagatggaatgggagattgcaagctggatcgcatcctgtcatgcgaatgcacatatcgatctgaagcagtatggactggcgaagccgtgggctgagatatcgttaagtacgcggagttcggatagaagtacaagtccgttgatcgatctcggcatgatctgcttgagacttgaacagcatgacgaggcgtattcgtatttgcatcaggcgtatgagttcggcagagagcgtgcatttcagggaagtccgagggacgtgttgagttattacattgaagagcgggctaagcgtaactagaatgattccgaccagaccatgaaacaaaaagggtaccccggtttggccaaaacatgaccacaggagtaccctttcgagttgaatattcgtttattacaggatgtttgacttcatttaatccgaaatgttacgcgtatagtattcaataatatccttacgacggataataccgaggaagacacgatcgacatccaccacgggcacaaaattttggtctgctgcaagtgtcagcatatcctccatttcagcctcaatgaatacacattcattatatacccgattgttaatctcatggacctgaacctgatccatcgtatcaaaagtcaatccgggtgtatttcgcattttccataacaaatcgccttcggacagggtagcaacatattttccatcctggtcaatcacgggaacggcggtgtagtgttgcgattccaattgctcaatagcatctttcatggaagcggtagacttgatataggccacttcggctttggggagtaaaaaatagctgatttccatcatcgggctccttttcagccttttgcatagcaaaaaagctttagtatgtaatctcactctccttatttaaacatattatgtgagctttcggctatttttaatgataaattcgtcagatttgtttcattgtttaaatggctctggaaatctatagtgtatattagaggtgatgtaaccatgaaatcaaaacgtaaattaatgtacggactgctgcccatcttgtttgcaggtggaatcggaatgtatctatacatgcagaataacaaagaagcagaggctaagccccagactaccgtgaatcaatacatagagcatctgcaaaaaaaagaatttgaccagttgtacaccttgatgacacctgcttcgttgcaagagtcgggcatgaacaaggaacaatttgttgagaaatacaatgcgatctattcgggtatggaagtatccaccgtcaaggcggaggttaaacctgtggaggttgacgaaacggcttccgatggcagtaagaccgatgcagagaaacaaaacccggatacctatgaggtggattacaacctgcaactgacaacttttttgggtgaagtcagtgagacgcatacattaaaactggtccggcaggagcttgaggacgggggaaaaaactggaaaattaactggcagccttcactgatcctgaatgacatggttaagggcagtaaggtacgagtgaggacactgttcccggatcgtggagacattgtggatcgtgatggtttgccgctcgctaccaagggcacgatgaatgaatggggcattgtacctgagaaacttggtgataacccggaccagatgattgctcgaatcgcgagccattatcaggtttcggaagatgccattcacaaggcgcttgcgcagacatgggtgaagccggagtattttgtcccgattggttcaacggaggagtttgacgtgccagaatctttaagcggggttacgatgcaaagcaaggaaatccgctattatccactcggcaatgcggctgcgcacctgattggttacgtgcgcaaagccaccaaggaagatctggataaggatacggaagggtattatcgcgcagaagattggatcggcaaagcgggtttggagcagtccatggagaagcagctgcgtggtgaacgtggtggtctgatcgaaatcaccgatgaatccggtaactctcgttctgagcttattcgcaaggatgctgtagatggacagaatgtacaactgacgattagctccaaacaacaaaagaaattgtatcagacattatccagtggtggagatgcaggtgcaatggttctaatgaatccgacggacggcaacctgctggcgttggtcagtgcgccttcctataacccgaacaaaatggtcacaggacttactcaggcagaatgggatgcttattcggcgaatgagaagcttccttttatcaacagagtcactacccggtatgcaccaggatcaaccttcaaagcgattacagccgcagcgggactggtggagaaggtgaccacagcagacaaaacccatgatatctctggcttgcaatggcgtaaagacgatagttggggcggttattatgtcaagcgtgtgaagagtttatcgccggttaacatggtcgatgctctggtgtactcggacaatatttactttgccatggaagcgatcgagatgggcagcgccaagtttattgatgggatccagaagtttggttttggcgataactttggactggatgaactgtatctgaagccaagccaatatgccaacgaagcacatctggatctgtcttccgaggtattactcgctgatacgtcctacgggcaaggggagatgttaatgtccccgatacatctggcgtcgtcatttacaccttttattaatgaagggaaactggtgaaacctgttctgatcgagggaaaagaaagcactgaccctgaggtaatcattactccggaagccgcaaatacggttaaggatgctttgggagaagttgtttcccggcagggaggcaccgcccataccttgaattcaattcctggaggactcgcgggcaagacgggaacagcggaactgaaagcgaagaagggagagaaggggcaggaaaacggattcttcgtagtgtttgataccgactctccgaccttcctgttatccgctgtgatcgaagaggtgaacggccggggcggaagccactatgttgtagataaattaaagccttttttggaaaagttggagattacgcagtaaatccgatttaatatatagcctcgcaaacatcataaaaagacccggtcaccatgttatagttctcacatgtgaccgggtcttttttgtttcattttgttcaatatggaatcatttaaattccgggcagtaatcacgaatggaatgtctccattatattcaattgacagcgtatacgcgaggtgttattttgaggtggaatgtattctatgagttcgaggtgatcgatggtggttattcgtgctaagcagatttttgtcaatttacctgtacaagatttgaagaaatccgttgagttttttaccaaggtgggatttgagtttgacgccaattttacggacgaatctgctacttgtatgatcatcggggaaaatatttacgccatgcttctggtggaggaacgtttccaatccttcatttcgaaaaaaatctccaatgccgccgatacaaccgaagtcatcgttgccctgtctgtagatagccgtgagcaggtagatgtgattgtacaagctgccctcgatgcaggagggaagccatccaacgaaccacaggatcacggattcatgtatggatggagttttcaggatctggatgatcacctgtgggaagtttcctatatggatctcagcgcttttccttcggagtaataaaatgaaaataactagagccttcctagatctataggaaggttcttttgcatccattatgactcgtttaaacatgagatctatagaacatatggtgtaatattcctttttactatatgataaatatcgattcatgttggtgttttttagcaattgatgcgataggcgaaccccgggaaagcgaagtatacatatgttcttaagtggagggatcagggtgtattgtcatgtatgtgggaccaaaaacagtccggcggataacacgtgcagaaagtgtagaaccaaattgaaagaaacaagctctacagaggaacagatctgggcagaaacagccattgacttggataaaggaacgcaaaaagcaattgattcgttgtcccgtcagcagcaaccggcttccaaacagggaaatacgggacaaggtcttgcatttagctggattattcccatacttctggcagtagttgtaggagctttgctaacgtattattacaagcaggaaacaggtataaatgcagaggttaaatcactgcaccaacaggcggaacaggctgcactagagggaaaatataaagaggctctccaactgctggacagcgctctaacgaaacgaccgaactatgatgcacttatacaggatcggcaaattacggcgaaggcgttcaacatgatgaatcagttggatgaggcgtccacaagtttgaagacaggaaagctgtccgcaggagacaagaccattcaggctgtagccaaagcgttgatggagcgggaagaacctatttttgccaaagtgcgtgccgcattcaacaacagaaaggtaacgctggccgtattgaaggtgaaaaaggaaatcgacagtttgacaacaattgaggcactagccgagaagttggacactatatcagacctgaaaggcaaggaagctgagacggtagagaagcaaattgtcgacaagctcgcaagcataagttataaagaggcggaacagcaagtaaagcaaaagaatttcacaattgcgttacaaacggttgaccagggattgtcctatgcgccggaaaatgaaaaactgacttcgtatcgtgaacgggtgctcagtgaaaaaaaggcatttgaaaaagcggaagcggatcggattcaactggcggagcaacaggctgcagaagaagatctgatgaatcgaacggcggcagtaagtgtcgtgaacgttgatgcgacgcttgatatgtacggggatctttatattagcggttcattgatcaataatgcaactcgtccgatctcttccgttacagttttgattgatatttataatatagacggtatatacctgggccaaacttatgcagatgtgtatccaagctggctggatgtgggggaagaaggtgtttttgaaacctattattatggtgtgtacgaggaagcggaaatctctgttgtgaatgcaacgtggtatctcgaataggaggacaggttggaatgaccaaacgaacatggagtacgatcatatccagtgctattatcattggtgctggagcaggaggcgtgttctggatacaccagcattcagcagatcagttgcaggatgggcccagactggcagttgttgccgcgaaggaaacggaaaatgcggcagcgacgactgcctccaagcaacctgtgaagaagacacgcaaacagattatagaagaaagccagaagaaagttgtaacgatcgagagtagcagcggattgggctccggttttctctacaatgatcagggagatgtcgtgaccaatgcacatgtggtggagggggcgaatgaagtaactattcggaccttgaaccatgaggaatataaggggacggttattggtattgggaatgaaacagacgtagctgtagtcagggttcctgatttgaaaaaagttaagccgttaatcatcgccaaatccaaagctgagaccggagacgagattctggcattgggtagtccacttgggctagagaacaccgtaacaaccggaatcatcagtggattggggcgtagctttgaaatagcaccttacatctatagtaacctctatcagatctcggcaccaataacccatggcaacagtggtggaccactcattagtgcggagactggtgaagtgatcggcattaattcggcggtcgtggagcaggaggggggaataggattcagcatccctatgactagtgtgctcaagcaggtgcaggcgtggtccaaaaatccttctggcacaacgtcggtgcggacggttggagatactcacctgggctcagccactaagacattgcaagcagaaggaattgtaacggacttttatacaagccttaatctgagtgattatgtcaccgcttatgcactgctcggaagcgagtggcagagtgctacaacatatgccaagttcagagaaggatatctgaatacaagtgaggtgaccatcagtgaggtatcctcagtcaataaaggcgatgacgagatggaagtgaaggcaatgattacagcaaatgaacgcaaagatggggaatatataatatcgcaatatcgggtcgagtatcagttgggttatgagaatggtcaactaaaaatattgcatggtaaaggtaaaaaagtgaaatgattgtggagggagagtgggcatgcgtgccaattctcctttttcattgcttatattgggtgcatctgttaaaatacagaacgaatgttcagtatggatgggacggagtgaaatggaatgaatatgaataaaaagcaacttcaaaccgagcagaccaagaagaaacttgcggatgcttccaaagccctttttgtacaaaaaggttataaagcaacgtctattgaggatattgtagctgcgacgggcagcagcaaaggcaatatatattaccattttaaaagtaaggaaggtctgttcctctatctaatcgatgagtgggatcgggagtgggaagagagttgggcggccaaagaacatctctatcgcacctccacggaaaagatatacggactggctgaacaactcgtcatggatgacatgaatcacccgctgacgaaggcagctgatgagttcttcacaggggaaaagaaagaaaatgatattgaggagcggatctccttaatgtttgagcggcatattcaatttaataaacaaatgatagagcaaggcattgagagcggtgagttcaaagcagacaatgtagataatctcgcgctcatattggaaagtaccattattggccttagtcagatgtcacgggggatggagcctgatcaggctctcgctctatatcgtcaggccgctagtgtattcttgcacgggattgcaaaagataaagcttaagcaacattttgacaactacggaggatggaatcatggcattactaacacggaacaggggcgcattgctgctgttaatgtttaatatttttctcgtttttacaggtattggtcttgttgtgccgatcatgcctgcgtatatggatctactgcatatcaccggattcacggttggattgctggtagcggccttttccttcacccagtttctgttctccccgcttgcgggtcgttggtcggatacatggggacgtaaaaaaattatcgttggcggcatgctgatctttgccgtatcggagtttatgtttggtgcggtcaatgcaccagtcttgctcttcgcagcccggatgcttggtggtattggtgcagcgatgatcttcccggcggttatggcttacaccgcagatattacaacagaggaagaacgcggcaaaggtatgggattgattaatgcagcgattacaaccggatttatcatcggtccgggaattggtggatacattgcggactttggcattcgaattccgttctacgccgctggggttgccggtttgctggcatccatcattacattgattattttgccggaatccacgcgaagcacaggagaacaaagtaaacctgtagctggcgcagagaaggtcaaagctccgggtatggtatcccaattgctcaattcataccgtgaaccatactttttcagcttgattattgtttttgttatggcatttggtctagcgaactatgagacggtattttcactatttgtggatcacaagtttggcttcacgaccaaagacattgcatttatcattacatttggttccatcgcaggtgcggttgtgcaagtatccctgatcggttggttgctcaatcgatttggtgaaaagatggtcatttcagtctgtctgttatttgtagccgtatttgtactgttgaccttgtttgtaagtacgtactggatgattcttgtcgtaacgtttatcgtctttctgggtatggatattttacgtccggcgatcagtacacagatgtccaaactggcacaagaacaacagggctttgtggccggactgaactcggcgtataccagtttggggaatatcgcaggtccaatcgtagctggagcactgttcgatgtgaatattaactatccttatgtttcagcagctgccgttctggcgatctgtttcctgttatccctacgagtactcagaggggccaaagcggtaaaacaaccgaaggctgaaatgtaattttataattggaaaataaagcttccatatcaatgcatcaacaccaaaaaagtcgactacacatgtttcatgtgcagtcgacttttttattagtgcgtgtattaacgaatttctccattcgtttcaatcagtttttgataccagtggaaactctgtttgcggatacgtctcaattccttgatatcgaattcctcacgatccacatagatgaatccataacgtttgctcgacccttgatgtgtgctgaccagatcgatcgcagaccaagggcagaagccaaatacatccacgccgtccgtaatcgccagttgaatctgttcgatatgtttattgaagaattcaatacgatatggatcgttaaccacgtcgccttcctccagtttatcaaaggcacccagaccattttccgtaacaatcaatggcaggtgataacgggagtagatctggcgcagggtagagcggaagcccacgggatcaatttcccagccaaactccgttttttgcagattgggattcacagatcctctatatgcgcccggttcacctacgatttcatgctggtctcctgtatgggagaagtcattgccatcgttcagactttcaccaactgtctgggaagtgtagtagttaaacgcaataaagtcagggtttccttgagccaggatgtccatatctccgtcttcaatgatgggagtatatcctttctcatcgagataactccaggcaatatgattataacgtccatataccgccatatcgagatagagccagttacgaatggcagcatagttatcagccgcgagtgtgtcttccggtttggagctcgccgggtaaattacaccgatattaggagctgggccaatcttggcttcaggcagcatttcatgacacaggaccatggctttagcttgagcaaccagcatgtgatgattttgctgatacagtgttttttgcggatcaacaagtgttgtatccagtgtaccgagagagccaggatgcaggattagcatattttgttcgttgatggtcagccaatatttaacccgatctccgtagttttcataaagagtcttggcatattgttcaaaagcatcaatcgttgctcggttggaccagccgcctttttcttcaagcgcataaggaagatcgaagtgatacatcgtcacaatgggctcaataccgtatttaattaactcattaatgagggaatcgtaaaaggcgaggcccttcggattcacttcacctgctccttgcggatagatgcgtgtccatgcgatggagaagcggtaggctttgaagcccatttcggcgagcaacgccacatcttctttgtacatatgataatgatcactggttaccttgaagtcggttacgccttccacatgattccccatgtcgatgacagaagggcctttaccatcttcattccaggctccctcaatctgataggcagaggttgaacctccccagaaaaaatctttaggaaatggtttcagttgagtatgtttcatagttagttcctcctaagttgaattcgtataagataagttgggtcagacaacgagagtcagcaggacatcatttttctgtacctgttcctgagttgtttcgaacacatctacttcttgtagcgttagggtcacaatgacaggggttacggtttcgtatccggcttccttgatcttatcgatgtcaaactggatcaacagatcgccctgtctgacgatatcaccttcctgaacaactggagagaagtgttttccctttagagctactgtattgatgccgatatgaatcaggatttccgttcctgcgttggttgttaatccaatggcatgtccagttgggaagagggaagtgacaacgccatctacgggagcgacaacttcgccaatctcagggacaatcgccaaacctttgcccatagcaccagtcgaaaaggctgggtcgttaatggtattcagtgctacggctttaccagtaagtgggctataaatttgttctttcttgatctccgttgttttggtctcaggtacgacaggaagttctgccggcgtactttcaactgacgtgtgggggacagattcattggtcgcggaaactttgtctttggttttgctttcataaccaaacatcaccgttaataccgcggctaccgcaaaggagcaggcaatcgcaattacgtagacaaccgttggtgtatagacaggaatggcaaatatattgtggaacacataagcagtcattttaacaccaaagtgaccattgatggcaccgccgatcgcacctgcgatagccacgataggaatcacacgtttataacgcaggatcagaccatatacaattggttcagtgactcctgcaagtaaacctgtaaggctggttgagccagcaagagtgcgcagggttttgttctttttggctttcaggaaaataccgaaggctacaccgatttgtgcaaatacagctgcagcagccatggcttcaatcggatcgccgccaaccccgatattctgtatcgtgattggagtgaagccccagtggagtccgaacacaaccatgaaggtcatgaatccacccagtacaacccctgataatataccgctgaccccaatgagccaagttacaccggaggagatccagtcacctaccgtggtgccgaatggtccaaaggccattgcagacagaggaaccataatcatcaaagcaatcattggtacaaggaacaattgcaggtctttcaaaatgatttttttgagtaatttatcgagaacagcgtagatactaatggatatgaagattgggaatacgctggctgaataattcatcatgacaaccggtatacccaggaacgatacatctgagccattatccatcagcccagtgaaactaggttccattagagcggcaccaattacgccagctacataaggattggctttcagcttcatacccagtgtgatcccaaggaagatgggcaaaaaataaaatacagcgttgccggtagcggataaaatcaagtatgtatcacttgtatccgacatccatccgagcatggtcaggacagtcagcaaagcttttaacatacctgatcctgccatagccgggattaacggcgagaaacttccggatataatttcaaaaactttggataatagcgaggttttttcccctgtagactcagccgatgaggaggaatctcctccgaaatctcggtttttcatgatctccgcatatacatgagccacgttactaccgatgacaacctggaactggccgccgctttcgacaacggtaataataccctcgtgtttttccagcgtttcgcgttcggcctttttcgaatctttcaggtcgaatctcagccgggtcgcacagtggacaagaccgttgatattggcttctccgccgacgagacgaacgatgtcatcccccatttttttatgatccatgttcattctcctttgttgttaagattgcctgaaaacaaaaaaatacctaaacgaatggctatgatcatcggaaagatgacctgttgccaatcatttaggtatcgcctgcttgagcagtaacaatccttgtcgttaagttgtgagacctactatatctgacgccgaaatcgtttgcaagctttttttattccacgtcaagcaaatcgttacgggaagtgacacgttgaatatggatcgtcaaatacaccttttcatcaatggacatggcactttcaaacttgtcttcaaggtactgattgatccgttgtgtgcactcaaaagccttgctatatttgtccttcacctgctcatacagaaagttatctcctgaagcaaattgctcctgttcattactcaacattctctgcacaaagtattgcagatgggtaataaaccgggaataattaaatgaattttcatccagggcgatgtggtaatggttggtcacaatgttgaagatatcatcaattacttcagtgatttcaacggtttgtttcatgccttgagcatcttgacgagcgttaacaaaatgcatcgcaataaagctggcctcatgttcatccatctggatgccgaattgttcctggatcagctccacagcgttcatgccaatcccaaactccttcttgtaaaacttcttaatctgccacaaaagggaattcttcagcccgacggatttacggtaccgggtaatggcaaactgaatatgatcgatcaatgatatatagatattatcactaaaaatatcgcccatttcctttttggcatggcccacaatttcgtccgctaacttcaaatattcgaccgatgtttccccaatcagatcgattaatttttgtggtattttatccgatttcagcacaaaggttttttcgattttatcctcatccacgggctgtccgtttttctttttgaagccaagaccgttgccaatgacaacaaattcgtgaccaacctggttctcagcccggatgacattgttgttaaaaatctgacggatgatcatatatgtgtttcacctcaattggtcgtaataaaaacaaaaaacccaaactaaggcttaatagacagccttggtttgggtatcgcctgcttaccagtaacaatcccgaagaagacgcagcttcctctttcaattatgtccactataccgctttcataacagaataacaatacaatgatttatggaaatggacgtaaagacgtggatttttggtataataagaaatgctggaagtgaattagatgggctgggttgcataataagttaccgaggacggtcatttttaagcatatacaggattattggagtgataacatgagcaatgcaaaaggaaaaggcggcaccggccgtggtacgggtaaaaaaggatggaaccgttggcaagccgctgctaaccgggcgaaaagtgcaccgaagccttataaaagtaaaggcacaaagaagaaggacgataccgaaacttcaagtggcaagcccgagtaagtgtggcttgacgatgccagaggagagagctgcctgactaacgggtgggtctctttttgcttgaaaagataaaaaattaaattgacagtaatgtaatatggtaataatatagagcttacgcaaattagatggtagtgctactatatagagaaaggagcaacagcatgcctgttaatatggatgaaaatccacttggactgattctgtcacggacgtatctggcatacaaaaaaacaacaaccagaaatctgagtgaacaggatattactccggaacaatttgcagtcttgaatgaattgagcaaggctggaagtcatatatcacagaaaaaactggctgaattaacagtgcgggaccagacaacggtaggcaaaattatagacaagttgattcgcaaaggtctggtgacaagagaagaagatccacaggatcgcagagcggttttgctttgtttgacggcggaaggactggaaatgaataacgttctgacaccaaaggcaaaacagcaagagcaagaggcactcgccgaatgttcccctgaagagcttgaagcattcatgaatgtaatgaatcgcatctatgaaaagatgaaataaatttttttgaccaaatatgtgcatgtgcatatatatgtagtgcaattattttaattttaactaatgggagtcgtgaacgaatgagaagcttcaaagattttcttaaagtgccacagacaaaaatagggttggtttttgcattgattgttccgctgttatttgttgtgatctggatgacgggttatcatcaagccacggagagagtggatcaacttcaagttgctctggtgaacgaagacgggacacagggaaaagaggtgcagaagcagattgaaacgctcgcgcctttccatgtcaatgtactgggttctgccgaggaagctgagcaacagatgaatgcaggtaactatgcgatggttattgttattccggaaggattcactgaccagattgcaggaggcacagaggcgagcttacccttttatatcaatcagggaaatgccgatgtagccaaatccattgtggaacatgctgcgaccggaatgactgcacaaatgggtcaagggattctggaatccaaggttcaagtgacactcaataacgatagtataaacagcgatgaactgagtgcagctattggacaagcgatggcgaagatgaatgaagggcctgtgaaggctgaaattaataaaacgaacagcgtgagtgattttgcaacatcgatgctgcctatgattctgggttttatcacctatattgcttcgatgactatgaatattcagtttaatattacgtcgaatatcatgaagcgtacccattccaaatgggaaatcttctcgggacggcaattgctgttattgtgtatagctttgattgttcccctaattgtggatacagtagctcttcagttcacggatgttgcgagctccttcggcgctttgtatctgtatcatgtgctggtgagtctggcttgtatctgttttacacaaatgagttttgccctgtttggcaatgcaggtcctctatttaatgtagcgatggttccgctccagttgatgactgcaggaaatataattccagccgagatgctggcgccattctaccgttatatcggaaactttctgcccgcttccaatggggtacagggatttatgcgtttgatctatagtggagaagcagttgggggatacatggttcatcttctattgatctcgattattacgtggggaattacgttgctgcgagttggtatgcaaaaagcaggtaatggacaaatgacgatgacgcctccagcatcagcacaggcacaacattaagagtttccttctatatataatgtaataacacacaagaaagtggttcacgtatagttatatgcgtgcatcactttttttgtttatcttttataatacctctacttatactcgtggtaacttacagtgcccccagtatcttgcatgaccttgataaaaggacaacctaaattgagcatattaatgaagctaaaatataagagaggagatgtaggctaataagtttaaaagcaattagacatgtattgcgatgtatgaatggaaagaatgtcatttaagctataataaactttagactgggatagaggagagcaacacagtaagagtagttgatttgtggtaaatgaattttattaaaataagtattgtaattaatatctatacgtgatatattattaatccggccaagaaaacacggtttaacactggtgcggtaagcgaatgaaataagtttcgaaagaaacttaaaaaaagagcttgcaaagttggttcc

SEQ ID NO: 13 - DNA, 168303 bp, Paenibacillus xylanexedens
  source 1..168303: mol_type = genomic DNA
agaagtgcagcaatgcatggagctgaccagtactaatcggtcgagggcttatccaatagcaagtgataattcgcatgtttcgtttcgaatctagttttcagggagcaatccttgaatgatgttgatgattgttatttggagagatacccaagtggctataaggggaccctctgctaaggggttagactgcgtaagcggtgcgagggttcgaatccctctctctccgccatctttacctaaagatggacaagcaatcaagacacaattaatatggcggtgtagctcagctggctagagcgtacggttcatacccgtaaggtcgggggttcgatcccctccgccgctaccatattacccaggaggcttagctcagctgggagagcatctgccttacaagcagagggtcgggggttcgatcccctcagcctccaccatatacgccggtgtagctcaactggtagagcaactgacttgtaatcagtaggttgggggttcaagtcctctcgccggcaccattaatgcctggaaccgtggtgtagttggcctaacatgcctgcctgtcacgcaggagatcgcgggttcgaatcccgtcggttccgccattaatcctaaaaattaaatatggctcggtagctcagtcggtagagcagaggactgaaaatcctcgtgtcggcggttcgattccgtcccgagccacctttaatccctggaggattagcgaagtggccaaacgcatcagactgtaaatctgctcccgtacgggttcggtggttcgaatccatcatcctccaccagttttatgagtcattagctcagttggtagagcacctgacttttaatcagggtgtcgaaggttcgagcccttcatgactcatctttaagaaaagagtgattaatcattaatttgattagttgctctttttttgttatgtaattttagctcaatatggatatttattaatgctggtcaagatatgataaactaatagaaaacatgcagagtggtgacgttcattatatgaagctcatacctgatttaaaacagcaaattgaagtcattataggcacaactttggacgaatatgaaattacaatagaagaatggatgcaatctgttgccaatctagttggtaatcatgaaaattcagagacccttggtgatgaaggtgagcgtcaggagttatctgatcaatctgcatctccaatttcatccgatgtgatcagtttgaatacgggaaagcgtatattttttaaggttcggatgaatgagcaagaagagactgtcgtgtgttggggatgccctgcaaaatctattaccgtggagacacgacaattgattgagcttttgatccgtactaacacggctctacccgatgaggtacaacctgttgtatatgagaatgatagggagcagtatttgactgaattgggtctctggcttaaagagcagatcgaagaaccaaccaagcaggaatctgaagcggttcctgatcgctttgtggtgcccgcaggattaaatgctgagaaaattctcttcttgctgcaaggggatacaccggatgcacatcgtttacgatccaaggaactcaacaagttgcttgagagttactttggcgaggagatagtcttgattcctttgggggagcaagagtggattttcatgggtgataaagaaattgttacagaagaagccgaggaagatacaacggaagccaaaaaggattcgctgaacgccttttgtctggggttgcatgaattggttgccagtgagtgggctggggtgttccatctgtccgcatctctgccatgcattcctgcgcaacaacttgtatcggtcacaactcttcttagagaaagtgttcacttagggagagcattccatgttacgcagcatattcatctcccatgggatcttcacctggagcggttggtagcgagcattccagatgatcaacgtatacgttttataaaggaaactggcaaagacacggtgatcttcaatgacagtgagacacttgctacgctggagaccttttttagcctggactgtaatgtcagcgagacagcgaaacgacttttcattcatcgtaatacgttggtttatcgtctggacaagataaaacaggagattggttacgatgtgaggcacttcgaaagtgctgttctagtgcagtttttactactaatgtacaaagtgacgaaaaagcattgatatttttgtgcagtttgcgaatagtcaaacctcacgtagatagggtattataaaaatacaaattgtattcgattacaaaatgatctctgaggaggcaacaatcatggctggagtacgtttagagcatattttcaaaaaatacccgggttctgataaagcaactgtagttgacattaacctggacattaaagataaagaatttctggtactggtaggtccgtccggttgtggtaaatcaacaacacttcgtatgatcgcaggccttgaggaaatttctgaaggtaaactctatatcggtgaccgtgtcgttaatgatgttgcacctaaagaccgcgatatcgcgatggtattccaatcctatgccttgtatccgcatatgagcgtatatcaaaacatggcgtttggtttgaaattgcgtaaggttaaaaaagatgagatcgacaaacgtgtacgtgaagcagctaaaatcctggatatcgaacatttgcttgagcgtaaacctaaggcattgtccggtggtcaacgtcaacgtgtcgctttgggacgtgcgattgtccgtgatccacaagtgttcttgatggatgagcctctctccaacttggatgccaaactgcgtggtcaaatgcgtgctgagatcactaaacttgcgaaacgtttggaaacaactgttatctacgtaacgcatgaccagatcgaagctatgacgatgggtgatcggatcgttgttatgaaggatggtatcatccaacaagcagcttctccggaagagttgtacaacctgccggctaacctgttcgtagctggtttcatcggttccccgacaatgaactttatctcgggtaaactcgctgagcaaggtactagcatgcatttcatagctcctggtgtggatgttgaaatcccgcaaggtaaagcacaagtgttgaaatctagaggatacattggtaaagaagtgattctgggtgttcgtccagaagacattcacgaagagccagtattcctggaagcatccccgaactctgtattctctacacacgtagatgttacagagaacctgggtcacgaaatgctcctctacttgagcggtgttggtaatgatacaacgatcgcacgtgtagacggacgttctaacactcgtgatggttccacagttaaaatggccatcgacatgaacaaagttcatatctttgacaaagagactgaagtgaacgtacttcttcaagacaaataatactgggattcctcggtgacgatggaacctgacagttaacgcaattatacattgtaatgagagccccttccgttattgctggaaggggcttttttaagattattggaattataagtttccgcagagttgaaggattaataatcgtaagaaaaacaccccttaaactacgaatgtagtatcctagaaggtgcttcaatcagaagacttttcttactaatggttgtcggaggctgcgattgcattcatcccggaattcatttaagattatttgaaggtctgtcttcatttatttgagagaatcgactgttggaagggtatgcattctgtaccccatgttgtgaatgcgctaataatggaaataactgatacacgatctgatgtacatagagggacagctaatgctgaaaggaagagacaaatggcgaaaaaagtgaaagtatctgaactggtgcagcaatttcagttggaggttgtttctggatctcacggattgaaaagagtcattacggtagatgacctgaaccgtcctggtctggaaatggccggttattttgaataccatccacaagaacgggtacagctgcttggaagaacggaattagctttctttgcaatgttacctgagcaagagcggcgcgatcgtatgcaacgtctttgtacggaagagacgccttgtatcgttgtcacgcgtggactggaagtcccgcaagagctgattgatatcagtgaagagcagaatcttgctgtacttcgcagcaacatggctactacgattctatccagccggatcacgggattcctggaaaagaaattggcaccaactgcaaccattcacggtgtactttgtgatgtctatggcgtaggtatgctgatcacaggtagcagcggtattggtaagagtgaaacagcgcttgaactggtgaaacgtggacaccgactgattgccgatgatgcggtagagatccgccaaacgtcagattttcagctgcacggtactgcacctgaattgatccgtcacttgctcgagattcgaggtgtcggtattatcaacgtcatgacattgttcggggctggtgcggttcggaataacaaacggattactttggttgtacgtctggaagcatggcagcaggataaacaatatgatcgtctgggtctggatgaagagactacacgtatcattgatacggatgtacctctcgttacgattcctgttcgtccgggacggaacttggcggttattattgaagtggcaggtatgaactatcgcctgaaacagatgggtctgaatgctgcactgcaattcacgaacaagctgacagcaaccatctcggaagatatggaagacatggattaagaaacattttatacaaggaaatgaagataaatggttgacatgtactgcttctcttaaggcgcagtgtatgccaaccattcgtcatgcgtgcgattgattgaataaataggagtgtgaatgaatggatacattattactgttgaacccgattgcgttctctattggagcgttaaaggttcactggtacgggcttattcttggtgctgcggcacttataggactcctgctcgtgatccgggagggcaaacgatacaatattccacaggaagtgttcatggacatggtcctgctgggtgtgccttctgccatcattggtgcccgcatctactacgtagcatttaagtgggaagattataaggataatttctgggatgtctttaaaatatggaatggcggtatagccatctatggtgcccttattggtgctattatctgtgcagttattttcttccgtcgtaaaggatataacttctggcgtatggccgatatctgtgcgcctggactgctcgttggacagttgatcggacgctgggggaactttgtgaatcaggaagcctacggcggtcctgtggaagaatcgtttttgagagacaagcttcatctgccggactttattgtgaatcaaatgaacgtagaaggcgtattccaccatcctgcgtttttgtatgaatcgatgtggagtctcgttggtttggtcttgctgttggttctgcgtcgtcagaagtttctgcgttcaggtgaactgttcatgtcttatttcatctggtactcaatcggtcgtttcttcattgaagctttacgtacagacagtcttggcttccaggctccgcaatgggttgcttcattagtgaacgggctgtggtctccaatgactgcaatgggctttgaacaaggatatcttgatcctgcttatggtaatgtaagaatctcgcaactgctcgcgattggcattattattgttgctgttgtattcattgtggtgagaagagtgacaggtaaagcagttgttcgttatagtgatccgattgtatcgtccaaagttacctcagatgatatggagcatacaggaacagttgctggcaaagagagtaaggtaacacctccagccaaagatgatccgaagcaagttgatgataaaaaggagtaatgcaacatgattgacacggtattgtttgacctggacggaacgattattgataccaatgaactgattatcagctcattccagcatgttatggggggatgggagcattcagctccatggactcgggaacagatcattccacatatgggtggcacactggagcagcaaatgcgtaccttctctggccaagaggaagtctccgagtacgtgaaaggttaccgtgcttataatgatatccatcatgaagcgatggttagaccatttccacatgttattgaggtagtagaggcgctgcatcaggctggcattgttatgggtgtggtcacaaccaagattcgtccatctacattaaaggtgctagaacgttttgacctactgaaatatatgaagacaattgtaacagtgaccgatgtgacgaatccgaagccgcacgctgaacctgtactgaaagccatgacggaactgggtgcagatcctgccaaaacgttgatggtgggtgacagtccggtggatatccaatcggcacaaaatgcgggcgctctttcggcgggggttgcatggtctcttaaaggagaaacaatcctgaacggatatggacccgaccatatgttgcatgacatgagagacttgttgaaactcatccgtattgaaacgggacgttcatgagaaaagtaacccgctatccggtagaggaccagaatgcactttggcatatctacaagacagtgagtccgtggaagggcgttcgtaattttatctggatccagttgtcacgttattgtccaatcctatcggtgaagaactggatttaccgccgaatgctcggtatgaaggtgggaaaacacacagcctttggcctgatggtgatggtggatgtgttttttccggagaaaataacggtcggcgaaaactcggtcatcggttacaacacaacgattctcgctcatgagtatcttattaaggagtacagactcggtgaggtgattatcggggaaaatgtactgattggtgctaacacaacgattctgcccggggtaaccataggggatggagccgttgtagctgctggagcagtcgtacataaggatgttgcaccaggagcttttgttggaggtaatccacttcgtgatttatcccgtgcggcagcttctacggaagaaactgtctttaacacggatgattcttctcagggtagtgtgcattgagtcaataaagtaatgaatgaagatgtgttgaagtaaaaagctgcttatggcagcttttttcgtatataaataccgattggtgagtgtaacggtgtgtatataaaacgatatgtcgatccaagggcaatcaagctttggtattgttgacggtagtgcggatttcatgttatcatatcccatatcctttagtttgttagcactttaccatgtaaaagtattcttgtagaaatgaagcatgataaagattgaactaaaccaatagttgaaggcttatgcgaaaatactgtgattcaggtttataagatagaatggggatttacactacataaatcctgttgaaatagaacgagtgcaactcttaaattactgactcggggtgaatattaccaatgtccaaaccaaaaggttttgaaaaaccgaccggattccgcgactatacaccacatgtagtatccaagctgcggacgattgaacgcaatgtactggaatgtatggaacgctggggttaccgtcagattatcacaccaacgattgaatattacgatacggtaggtgtggcaagctctacatcagatcgtaaattatttaaattgctaaacagcaggggaaccacactggtactcagatcggatctaacggctccgattgcacgcgtagtttcatccatgctcaaagatgagcagttgccactgcgtctgtcctatcatgcgaacgtattccgttctattgaagaggaagctgggcgtgaggctgaattctttcagacgggcgtggaactggttggagacgattcacctgaagcggatgcagaagttgttgcgcttgcgattgcctctttgcaggcagcgggcgtgtcttcttttaaaatagccatgggtcacatgggattcctgaacggtttactggaggaagtgattccaggccagaccgctgagcaggagcaattgaaggaagggctgctcggacgcgattatgtcggatatcgccagtcgattgaagcattgaatctggagcctaagttgaaagaacagcttgaagcgatccttcgtctgcgtggtggcaaggaagtatgcacacatgcggtagagctaagttcaagtgctgaagcagcacagtcgattgcacatctgtgtgccgtattcgaagtgttggaagcgtacggtgtatccgagcatgtgctgattgatctgacgatgatcggtgatttctcctattatacgggcatgacctttgaagggtatgcagccgaactgggatctccggtatgtagcggtggacggtatgataatctcttacaacagtttggtcgttcattgccagctacaggatttgcactgaaaacgaaccggattattgacggtgttcatggcattacaattgaagagaaaaaaccggtgcttatccaatataccccgaaacgtcgggccgaggcactaacagaagcggcaagattacgcagtatggggcaaaatgtagtgacactgcttcttcctgaagacggggctggggtaagtaccgtatcggttgaagcaagaaccgctcaggctgagcaggttattacttacggatctgaagaaggaggacgctgagatgtcggatattctgaaggtggccatgccgaagggccgaatctacaaaaaagcctccaaattgtttcgtgaagcggggctggatattccagaagacgtagacgatacacgcagattggtcattgaagtaccggaagcgggaatggaattcattatggctaagccagtagatgttccaacatatgtggagtacggtgttgctgatatcggaattgtcggtaaagacgtgctgctggaggaagatcgggacgtgtacgaactattgaatctgggaatcgcccagtgccgtatgtctgtgatcggacttccagactggaagccaggcatccagcaacgtgtcgcaacgaagtatccgaggattgcttcgcagtatttccgggagcagggacagcaggtcgaggtgatcaagctgaatggttccattgagcttgcgcctttgattggtctggcagaccggattgtcgatctggtggagactggtcagacgctgcgagagaacggactggtggagatgacaggcattctggacatcaccagccgtcttatcgccaatcgggtaagttatcggatgaaaaatgcacgaatccaggctttgtgtgatgcacttcagcaggtcataccggcatcgaatgagatttctgcgggaagccttcggggataaactactgcgtcagaaatatagatgagaaacatgtaaagcagaagcagaagcagaagcagaagcagaagcaaaattaagagtaagagacaaaataaagaagcaaatcggccacaagaaggcaggtattacagaggatgaggaggttgtacgtatgaaaattgtacctgcacgggagtttgatctgaagcgggaagtggagtatggcacgccggggcaaaatgaaacggtacggcgtattgtcagcgacattcgccgtgagggtgatgcagcactgctgcgttacacggagcagctggaccgcacgaagctgacggccgcggaattgcgcgtgccgcaggaagagctgcaggcggcttatgcagccgtggagccatcctttgtgacggcgattcggcaagccgccgccaacattcgtgcgtttcacgagaaacagaaacgcaactcgtggatggattggcagccggacggcagcctgctgggccaggtcatccgaccgctgaagcgggtcggcgtctatgtacctggcggcaaagcagcgtatccatcgtctgtgctgatgaatgtgattccggcacaggtggcaggcgtgccggagattgttcttgtgacgccgccgtcaacgaacggtggcgaaggtattaacccgtacatcctcgttgctgctgcggaagcaggcgtgagcgagatgtaccgggttggcggcgctcaagctatcgccgccctggcttacggcacggagagtattgccccggtcgataaaatctgtggaccgggcaatatttacgtggcgctcgcgaagcgcgaggtgtacggtgcggtcgatatcgatagtatcgccgggccgagtgagattgtggtgctcgccgatgatacggcgaatccagtgtacgtcgccgccgacctgttgtcgcaggcggaacatgacgagatggcatcggccattctcgtcacgaattcggccgcgctggcggaagccgtgcagggcgaagtgcagcggcagcttgaagtgctgccgcggcgtgatatcgctgctgcttccgtggagcagtatggcgctattattgtggttgattccatcgatgagggaattgacgtggtgaaccggctcgcaccggagcatctggagatcatggtgcaggagccgatggcttacgctggccggatcgaaaatgccggcgcgatcttcctcggcccgtacagctcggagccggtaggggattattttgcaggacccaatcacattataccgaccaatggcactgcgcggttcagttcgccagtggacgtggatgattttatcaagaaatcgagtctgatctattatagtaaagaagcgctgctgaagaacggagcggctattatagagttggcccgccatgagggtcttgaagggcatgcccgtgcaattgctgtacggttagaacaggaaggaaaggcggaatcggacaatggataagcaaaataatggtgtggaacttgaaaacaaaggtgcagtgcgccaagcagaggttgaccgcaaaacaaacgagaccaatatccaattggcctttaatgtagatggaacaggacaatccacgattgaaacggatgtacctttcctgaatcatatgctggatctgttcacaaagcacggacaattcgacctgaacgtgcaggcccgcggagatattgatatcgacgatcatcacacggttgaagacatcggaatctgtctcggacagacgttgcgagaagcgttgggtgacaaacgtggaattaagcgttacgccagtgtttttgtaccaatggacgaggcactcgctcaggtcattattgatgtgagtaaccgacctcactttgaataccgtgcagaatacccttcccaacaagtaggcagtttctccacggagctggtacatgaattcctgtggaaattagcgctggaagctcggattacgttacatgtcattgtgcactatggtcagaacactcaccacatgattgaagcgatctttaaggcattgggacgtgcactggatgaagctacgatgattgatccacgtgtaacgggtgtgccttccacgaagggagtgctgtagacgatggcgattgcaattgtcgattacggtatgggtaacctgcacagcgtcggcaaagcggtcgaacgtcttggctacgaagcgctggtcacgggtgaccgggaagagattcttggtgcagatggtgttattctgccaggcgtaggtgcttttggtgatgcgatggttcatctgcgggagagtggactggatacggtggtgaaagaagccgctgccgggtccaaaccactgctcggtatctgtttggggatgcaattgttattcagctcaagtgaagagcatggtgagcatgagggactggatattttaccaggtaaagtggtgcgattcgcaccaggagagctgaaagttcctcatatgggatggaaccgtttggaattcctgcacgcggaaaacccgctatttacggggcttgaggcaggtcacgtctattttgtccattcctatcatgcgcttactgaaaacagggaggatctgctggcggtaacggattacggacatccggtgacagccattgtaggcagaggatccaacttcggcatgcaattccacccggagaaaagtggagagcttggtatgaagctgctcggcaactttttggctctgacaggagcacctgtacaaaggtaaaacatcatctcttcttaactatagaaagcgtacaaatctaattcatattcaggaggccttgtatgtcatcttttatcctatatccggcgattgatatccgggacggcaaatgtgtaagactggtgcagggagattataatcaggagaccgtgtataacgatgacccggttcaagtggctttatcctgggagaaacaaggcggtacatatgtccatctggtggatctggatggtgcgaaagcgggtaatcctgttaacgatgagctgatcgggcggattgcctcggctgtgaacgtacctgttcaggtgggcggcggacttcgtacggtagcggatgtagaacgtttgctgggtctgggtgttagccggctgatcattggaacagcagcaattgaggatcgtgcttttacagaggaagtactgggacgttacggcgacaaagtggcaattggcatcgacgctcgtaatggttacgtggcaacccgcggatggcttgaaacatcggaagtacaggcagaggtactcgcgaaggaattggcggcgtatggggcagaaacgtttatctttacggatatatcccgtgatggcatgatgcagggtcctaatgtggaagcaattgtgtctctagccaaggcaagcggacggacggttattgcttccggcggtgtgagtgtaatggatgatctgcttcgtctgagtcgccacgcggatgatggtgttggtggagcaatcgtgggtaaagcactgtatacgggaagcatcgatctgtctgaagcagtacgtgcggtcaataagtaagggatattcggatagagaggaagaggtagcatgctggcaaaaagaatcatcccctgtctggacgtgaaggacggccgggtcgtcaaaggcgtcaacttcgttaatctccgcgatgcgggtgatccggtagagctggcggcactatatgaccgcgagggcgcggacgaattggtgtttctcgatatctccgcttcggtagaaggtcgcgaaacgatggaagaagtcgtgcggcagacggcgggtgagatcgctattccctttacggtaggtggtggcatctccaaagtggaggacatgaagcggattctccgtgcaggagcggataaaattgcagtgaatacagccgcggtacttaatccgcagttgattgcagatggtgcacgtcgctttggctcgcagtgtatcgtggtagcgatcgatgccaagtataacgaagcttggggcgagtgggaagtctatacccatggtggacggaaaccatccgggatcaaggcgctggaatgggttaaacaggctgagagcttgggcgcgggggagattcttctcacaagtatggacgcggacggaacaaaagacggctttgatctgaagctgacggcagcggtatccgaatctgtgcgtattccagtcatcgcatcgggcggtgcgggcaaggaatctcatttctatgatgtatttaccacaggcaaagcggacgcagggctggccgcaacgattttccattacaaagaaatcgccgtaccggcgttaaaacaacatttgagagaacaaggggtggagatccgtgactaaagtgagcgatgaaatcaaggaacagttgtccttggaacaggttgtggaacacattcgttggagtgacggtttggttcctgccattgtgcaggatgtggatactcgtgaagttttaatgatggcttatatgaatcgcgaatccctgaagttgtcgctggaatccggtgagacctggttctggtcacgctcgcgtcaggagttgtggcataaaggggcaacatctggcaacgtgcagacgattacttccctaaaatatgattgtgacggcgataccttgttggttgaggtgaaaccgaacggtccggcttgccatacaggggcggtaacttgtttccataatgaaatcattggtttgccagagaaatcggctgacaaggcttcggatgaagcgggtgcggcatctgcttctgcaagttccggttccgaaagtcgctttgaggtattggctgaactggaatccgttattgcagagcgtgaacgtgagcgtcctgagggtgcatatacaacgtatctgtttgataaaggtgtagacaaaatactgaaaaaaatcggtgaagaagcgtccgagacaatcatcgccgccaaaaataaagataatgacgagcttcgtctggaagtcagtgacctgatgtatcacctgctcgtcctgttacaagaacgcaagctaccgctggacgacattatgtcagagctgagccgccgtcatgaacggcctcgccgcgattaggaggcgagtttcgtgcgtatagactatcatacacaccatgagcggtgtggacatgccgttggcaaactggaagagtacgtgcagcgtggtgtggagatcggactatcccagattggattgtccgatcacatgccattgttgcatgtcgatccggctcaatattatccggaaatggcgatgcctatggatgaactgccgcgttatgtagaggagtgtttctccctgaaagaacgttaccgtggtcagattgacgtacgtgttggtctggaaggtgactatattgaaggatgggaaacagagatccgtgcaatcattgagcgttatccatgggattatgtgattggctctgtgcattttctcggggaatgggacattacggattttcgccagacccatcactgggagggcaaagacatccttgaagtatatcgtcagtactacgatgccgtaagcaaggcagccgccacgggcatgtatgatattatgggccatacggatgtcattaaacggtttggctttgttccttcaacagagcagacagaagaacgtatctcactggagaacgcagcgttgcaggctattgccaaaagtggctgcgccatggagctgaatgcttccgggttatcgaagccttgtgccgagatgttccctagtcgcagaatgctgacagaagccattcgcttgggtattccattaaccatgggctctgatgcacatgacccactgaagctgggcgattatttgcctgaagctgaagcacttttacatgagttgggctgtacggaagtcgctgtttttgaaggccgtcatcgctcgttcattcctttaaatgtataagccattagagtataatgagggtaggaaataaccttttagaggtagttcaaaaagtccgcctttgattacgaaggatgcctaatggcatcttcagcatcgaagctggaattcagctgaaatgtccgttgctcacgtagttttgcctacgctccgctactccatttctagctttatcccatcttctcggtactgaaaaccggtctttttgaacactcgcttttagataagggattatatagggacttcaaccctcgggagggcattatgcagcattcgttacgtattttttccggttcatcgaaccctaagctggcagaacaggtatgtgacaagctgggtgtacaactgggcaagatcaagctgtccaggttcaagagcggagaaatatacgttcattatgaagaaacgatccgtaattgtgatgtgtttctggtacagtcgttgtctcatccgatcaatgagctgtttgtcgagttgcttgtgatgattgatgccgcaaagagggcttcagcgcgcactgtgaacatcattgttccgtattacggctatgctcgtcaagagcgcaaatccgctccacgggaaccgatctcggccaagatggtagcagatgtattaactacggctggcgccaatcgagtggtaacgatcgacctgcacgcagcggccattcagggattcttcaatattccggttgaccatatgacatcactggatctgattagtgattatctgttaagcaaaggaatcgagaaccctgttgtcgtctccccggatgcgggacgagcatcgatggcagagaagctggcgaaccgtctggattctccatttgccattatgatcaagaaacgtccaagccataatgaatcggtgattacccatgtcattggtgatgtagaaggacggacacctattattattgaggatctgatcgacactggaacaaccattctgaatgttgtggaagggttgaaggaacgtggctccaaaaatgtatatgtatgtgcaacacacggattgttctcggatggggcagtaagtaaattgaatcacccgtcaattgaagaggtggtcgttacggactcgattgcactgccagatgaccaccctgaatgcttcaaagtgttacctgttgcgccaatgctggcccgcgccgtacgcattattgtggatggtggctccatggccacattgtttaaggattctggtatttagagcatcgaagatataacggtgtgctgccagatgaactgttccgtgtctgagttgttgtctgctcagcacggtttttttgttttggctctttgaattcaattcttgctttgctgctcagaggcttgtgctataataacataaaatcagttatgatagcgttatcatatagtattcagcccctaaggtgagatggatgctgaacagtagaaccacggctgagaacattggcatcgtggagtgaggagtggggtctattgtctcgtaattggtactaccggttattgttctcgtacttcccaattttttttcttacggtgaccatactcatttttatcgcgtttgttttcatcaatgacatctctaaagaggaaacaaaaaaagcagaccggatttcatccagttatatgatagacacggtggatcgcacaatcagggatattgaactatccatcctggaaacggtacagagtcagcaggcatacaaactctattttaataacacaaacctgaccagctcggacacggtgtatgcaattgcccagaatttacgtgagctatccaattcgtcctcatggattcagtccatctatctatatgacaagcgaaataaacatgttctgaccgtaagtggttccagagaagtggaaggtttctcggataaggcatggattgatcagatgggtaccgggtcgatcggttcaggctggcagccggtccgggaattcgatgcggactctgttcaacgtacccctattcgcgtattaaccgtgaacaaggacatgcctttgccttttggctctcagggcacattggtcattaatatcaagatgagcagcattgaacagagtgtagatagtatggttaatggtcagctctcattcctgacgattacggatcgggacggtaaggttgtgtataacgcacattcggaccaagagggctcgatagatggtcaggaactgaataggctagcgctagaaagactgggctggacaatatccagtggaattaaggctggcaacttatttggctgggtatcggtcatatcttatgtatgggtgatcattgctattgtgactgtcatctgtgcgattgtatatatcgtgtatattactcgccgtaactataaacccattcagatcatcatgaaccggattgagtctcatcagattcgggcgttcgaacactcaggtgctcgcacggatgagatgaagatgattgacggtgtacttgagaatctgattaatcatatgatggattatgacaagaaaagcagggaaaatgtacttatgcagcgcagcaagttgttcaatgccctgttgcatggtgaacacatggaaaatgcagcagagcaattaaaagagctctctcccctgaatgacgtgcatgactcgtcgcgttttgtcgttgttgttggagagattaaccgttatgagaagggatttcaggagaggtacacgagaggtgaacaaaatacgctgaaatttgccttgatgaacgttttgcaagagctgtcacgtaatacgggagtccaatgctggacggaatggattagtgtggatcgaattgcaatcctttttgtgttcaaagaacagaatgataacaacttggatatgtctgggcagattcgtgttgtagctgaggaatgcaaatcttgggtagaacaaaatctacgcatttccttaagctttggcattggacctatcgctcagggaatcggtacaatccgagattcctatgcggccgcagaagcggtaatgcaacgtaaactgttgatgaatggagatgtcggccaagccgactgcggtgaaacacagcatcctttgctggatacctatacctatctgcagatgattgcggactttgttaagcggttccggatgtcgagtggacagtggcgggaacagttggaggagatctttacagcgtttgaacagaacaaactgccggatgatgagattcgttctctgattcaggccatgttacagatgctcagccgagaggtggccatgatgtcggaaggactccaggaagagctgtccgaagaaaacatcaacagatggttgagtgctgtagaagaggcagagacgcttgcggatgtgaaaagtcttttgtttgatggtctgacggacttgttcagaacgtatgtagcggtaacggaaaccaagagttacaaagccatggtcaacgaaatgaaaaattatatcgaagaacagtttgcgaatcctgatctttcattgaaacatctgagcgatcgattccagattacgggcaaacatgcgagttatttgttcaagacagaattcaacatgaagtttgttgattttgttacagagcttcgcatgaaggagacggagcagcttctgctcaataccgattactctttgcaggatattgctctaaaggttgggtatgcaaatggaattacgttgggacgtgtatttaagcgggtaacgggtattacaccaggagattatcgtcgtttgaaacgtgaacatcgagaacccgaagagtaacgcaaaagtgaacctattctgagatctgtacatcaggataacacagggtgaatttcatgcagtcactttccacttaggagagagaggcttgcagaggttcgccctgttttcgttgaacaatactcttatactgagatcggatgcaactgttttcgcaggataacaagctagtattcctgtttttttcccgtttacgaatataggcagtgtgtgaaaatggtttatccgacttgggacaggcagttctgatccttgaggtgaagagtgccgtcaaagcccagagcagcgtggctttgggaaaagaatcagtctgcgaaaatgggcttaacatataaaccataatccgtttgtaagcgcttccgaaagaggtttattgcaggatgacggaaaaatgtgaaatactctgggcaagctttaaacattcacgcaaagccaaaggggatgacaaaatgagaagcaaagcaaccaaagggagtctaaagaaatggatgggtttggcgcttacgatggtaatgggcgtttctttacttgcgggatgctcatcagcatcagaagaatcagctgaaggcggaacatcaggcaatggcgagcgcgttaccttaaaggtggagatttttgaccgtggtaacagtccttcaccgtacacaattacgaacaactatctatctaaaatgattcaggagaagttcggtgatcccaacaatattgatgtacagtttgtacccgttcagcgttctgaggaagttaccaagctgaacgtcctgatggctagcaatacggatgtccctgatattgtctttgtttatgactcaagcgtgttttatcggtatgcccagcagggtggtttgactgatgttggagagttgattgatcagcacggtccgaacctgaagaagttcctgggtgaagatactttgaagtttgggcaagtggaaggacaacagtttgctgttccgggtaaacgtgctatcacaggccgatacagttcttacattcgtcaggattggctcgataagctgggattgccagcgccgaagaccacggatgaattatatacaactttgaaagcgttcaaggataaagatcctggtggactcggaagcaaaaacatcccaatgggtatggctcttgcaccagctcaattcgaaacgctcatctactcattcatcaagccagttagtggcgacctgacctatggtcaacggtatgaattgccactgcatgaaggattcaaagaatcgatgcagttcctgaacaaactgtacaacgaaggtttgatcagcaaagacttcagtttggatgaagacaaaacgcagttagggaaagacattcaaaacggtaacgtaggttactggtctgaagatgtggatgccatgttctacggagatggcacactggataacttgcataaaaatgtgagtggcagtgaagtgttgccggttgatgtatacaccaatccaaatgcagacaacaaacacatcaagtcacgctacggaacaaatggtatgtacattatgattccgaagagcagcaaacgttctgtcgaagcgatcaaatatctcgactggatggcatctgacaacaatctgattgatatctacagtggtgtggaaggcgagaactatgatctggtagacggcattccggtagtgaaagaggatgcatcccaggaagcgcaggatcgtctgtttaacgcaggggatacagccattatctcgaacggtaaaaacattggtgatcaagcgacgaatgaaaaggcatggattatgggcttcccgcaaaataatcaggagatgctgaaacaatccattgatattgctaacaccgatacggtaggaccaatcattttcgacaaaccgattgaagcagagatgaagtacagcacagctctcaaagacaaattaaatgtcattatcgtaaaaacagcgatggctaagccagcagaattcgatgcggtatatgaaaaagaaatggctgatttcatgtctctgggtggtactgaactgaaaaaagaacttgaagaagcagttcaggcacttcctgcaaattaagtagctccacatttcaatccaagacagatacccatactacggcttaactagaaggaacgtgtgccgccgaactggcggcacagccgtttccttgttgataggaggaaaccgacttgaccaccacatacttgaagaggtattggcaattatacgctctgatttcactgcccattatctactttttaatctttcgttatggaccgatgtacggtgtacagatcgcctttaaggactttaacctgtttcagggaatcagcggcagtgagtggatcggttttgatgcttttcgcgaagtatttggaatgcgggacttctacacgacattgcgcaacacctttatgctgaattttcttgatctggtcgtttcatttccagctcctattattctggcgatcatgctttatgaagttcgattcaaatggttcaaaaaaatctcacaaacgatattgtacattcctcactttatctcatgggtaatcatcgggggaattgtgtaccaattgttcggtaatcaatccggtatggttaacggtgtactggaaagcatgggcttaaattcaataccatttttgacagaaaaaaatccatggcttgtgacgtatctcttcacaggtgtctggcaaagtgcaggatggggaaccattctatatctggccgcattaaccggcgtcaacaaggaattgtttgaagcagctgagatcgatggagcatcgcggctgaagagaatctggcatattacattgccaagtattaaaccaaccatcgtgaccttgcttattctcaatcttggacatatggtcagcatcggttttgatcggccttatatcattggtaatacggccgtgcgtgaatattccgatgtactcagtacctttgtatacagagttggtcttgaatcaggacaatacacgctggcaactgtcgtcggactgttccaggcagtggtgggactcatattcgtgctaggatctaactatatttcgaagaaagcaaccggtgaaggtattttgtaggttgtggatgaacggaagagacgccaatcggcttgtttgtatagaccatcagtaaaggagctgtgcgcatatgagtgaacgcacctcaaaccggatttttgatatcgttaatatctcctttatcaccttgtttgttatattctgcctggctccatttctgcacacgatcgcgatttcattcagttctaaccgtgcgattacgtcaggcgaagtgaccatattcccgaaagaattcaattgggatgcgtatattcaggtgttctctgatcagtcgatgatctactcgctgggttacacgacagttctgacaattgctactactgtcctgtgtatgatgttcacactggcagctgcatacccgttaaccaagaaaaaattgaaagggcgcaagctcttcatgtatgtcatcatcattacgatgttcttcagtggcgggatcattcccgagtacttgctcattcgtgacttgaacttgcttaattccgtgtgggcactgattctaccaggactggtcagtccgtttaacctgattatcctgatttctttcttcagaggcattccagaaagtctggaagagtccgctgagattgacggcagttcccatgtacacacgctatttaaaattatattgccattatccatgcctgtactggctacattagctcttttctatgcggttggacgctggaatggattccaggattccctgatgtatattaatgatccgaagctgtacccgcttcaactgaagttattccaaatggtacagaacaatatggtcagcgagcttacccaaatggagggtgctaaccgtacgccattgactcccgagagtctcaaggccgcaaccgttatttttgcaaccgttccgattctactcgtctatccgtggctgcaaaagtattttgttagtggtgcgatgcttggcgcggtaaaaggttgagttaaggctgatgtaaaaagtttagccagagggaggagaaggaaaacagatgcagcacatagacaagggcgaatactcattctcgacatgttggaacatcaggaaacatccagtaggggaagatatgattcgggagattgcggatctcggctttcgtcgggtggagctcaattataatgtgacgaaggagatgctcacgacgattgagcccatgattgagcgtggagagatcggaatttctagtgtccacaacacttttccacatgaccctgatccagactacggtacggattccatcttgcttggcttcgaagatgaagtgaaacgcaagcgggcgatcgaattgctggtagagtcggctgaatatgcccaacgttatgggggagaagctgttgttgtacacccgggagaggtaccttttcctgaggatatcagcaaagaccttggaaagatctataacgaggaaggtccggattcaccgaagtatcacagcaaatgggctgaattgatggagcggcgggaagctctcagttcagggtatgtagagaaaattattgccagtctggatgaggtatgtaatcgggcggcagctaaaggtctggatgttcgttttggcatcgagacaagatcgcgaccacaacagattcctacccttgccgaagccaagactatcatcacggctctcaaaggggctccggttggtatctggtacgatacaggtcatgccatcatgatggaccgaatgggcctttatgacagtgtgggagaaatgcaaggcctgatggatgatatcgtaggggtccatatccatgagacacttggtctctcggatcactggtgcccgtatgtacacagtaaggatatgaacttctatgatgcctatctgccgatgattcgtcgcgcacaggtgaaggtgtatgagttgaagtctgcctgtaaggcagaagagattcatgagagtcatgacttgctaatgaagaagcttggagtgacagagtaggcgcggtgaagtggggaacagtttgcatgttcacagcctgtgttcaacgactgtttcctcagtgacggagacacatgagtatttagtaaaacaagcacagattttctggcgacttttgtagaaatatgatatatactgacgagaaaaatgaactcacctacgggcggtatgagtaggcttccggtctgaattgaaggcactgaagcaacatactccgcacatcgggagaatgcattggtatggaggggactgcacatgtacaaacaactggtggacagtaatgacagagcggtagaaagaggcatatcccggcagatgcttgacccggaaagccgttactatggagggacaattgatcccttcacaggtgttgcctgggtcaaccatacgactggaacgcccacggatatgtgttactggggagctgcgctctccaatccggactctatctattaccgggatgaatcgttgttaaatcgactgctgttagctacggaatttgtactccgtttccagcatgaagacggttcaatatcgcctggctggaccaattaccattcccctccggatactgcatttgtcgttgtagggtattcacagttgtatcagcttcttcagcagcaagaatgggagccgcttcaacctgtattgaacaatatgaggctgtttctggaacgtacaatcccaaccatgcttacaggaggttgtcatacgcccaatcatcgctgggtgctatgcgcggcgcttggtttcctgcatgaaatatttgatctggaggaagctgtgcagcgcgcagagcagtggatggatgaaggcatggatattacacccgatggggagtggacagaacggagcaatgggatatacagcgcagttagcgacatcatgttaattcatgctgcgcgcctgctcaatcgtcctgaattgctggaaccagtgaggctcaatctccgcatgatggtgtatctggtccatcctacgggtgaaattgttacggattattcagggcgacaggatctgggcagtattcatgatctgtcaccttattatctgccttatgccattttggcccggctcgacggtgatccactttttgccggtatggcagcgtgggcgggagatacattaacagatccgggagtatgttcggtgaatacgctcattcgattaatgcttgagccggagcttcaacagaccaatgacacacgtgatgcattaccggaacagtatgaggtcatgctgaatgaacattttgtacggggcgaatatttggagcagatggacgcagtagggcatcacggacggatctcgcacagtcggatgcatacggattttggtgctccagtagcccgaattcgggatggcgctacaagtgtgactgtgatgacagaagttccttctttcttcgcgtttcgtcatggcaaggtgcgcctgctggctgtgcaactggcctcgttctttaatccagggtatgtacctatgcagcaaatgacgaggctgtccgaagggtatcgactaactggtgagcagaaaaaaggttactacggcccaatccctgcgaacctgctgccagaatcggctaaatcagccatcagtccatggtacttgttacctcatcagagtcgtcagcttactcatgagcagaccttccgtgtaggagcagaattacagccaacggaaaacggatggaacatgcatctatctggacaggaaccggaagacattatgatgcagttgtcctttgtattcggaagcgaaggtgaactgacctgtgaggacgcaattgaaacgagtgagggtcattatttgtggaaaggcggtacattacgctatacctgcggagaagactggctggagattaccgggggcgagctggggcatctggcggcaacggtacgtgaggcaaatctgccggacaagtgtaaggttgtgctggtcaatttcatgacgccgtttgataaaaccattcaaatttcactttctccttcgatggcgtcgaagatctagatttattagatatttaagccataacagttagaagaccgagcccaaatgctcggtcttcttttttacgaatgacgaatgactgcaattaacgttctaaaatgatattcccactgtcgagctcagtccagtaatatatgaactagtatcatttcagttgctctaacgcagtttcgattggtttagcaaacagagaattatctttggttttgctccagtaaacgataagaacatttcctttctcatatagaaaagggaatgttgtaaattgggcgccttccatgtgtttattgaattcttttgtcccgttgatgcgatccttttcagaattgaaaatataaaaatgtataaattcagggctatatggttcttcttccacgggcacttccacggagtacacctcaggtacaacatcatctaatttcaaaggatatccggttataccaaaggacactaaatccagttcttgagactcgagcgcgctcagtacatcctctaatgtgaactgattttctatgttgtctatattttttgaacatccattcaaagcaaacaagcatattaagatgaatataagtggttttatctttgagatcctcaatataacatccccttaaaatatttattttttattacatacgcgaaaaagaggctgaccgtcagagctaatatacgttgtttgatttttaatggagataaaccactaaaaaggacaataaggataataataccatatactacactcgtattattataaccggaccgaatccagttagatgccgcgtaaccgacaagaatagactaatgcaatactgcaaagagagcctatgataagtgagtgtaggagtctctaggtaaacatggttttcctttgagtaaacaacgctccaaggtgataggtttccgcaaaatggaatatcatcttcttttgcatttttttcataaacgacatgaaactacatattgagaagtgggccttaagatgtggtatactgaagagtatgaatgaaatgcaaagaggaggtgccttggaagatgaagggcaagctagtgcgggctgagggacaccttgccaatattataccgattcacttggatgcttctttcttctttgaaagagctgtccgctcgctggaccgtaatcatgtcgacaaggcattaaaatattttcgcaaagctgttgaatacgaaccggaaaatccggtaaatcattgtaatatggcgggtatattatcggagaagggggattacgaagcctccaatgccattctggctaacgtgctggaagtggtagatccgtcgatgacggaatgttatttttatatggcgaacaattatgcaaatatggatcggtttgaggaagccgagcaagcacttgttacctatctggaggaggacactcaaggtcagttcatgacggaagccgaagagatgatggagcttctgtattatgagctggatcgtccgactaaactgaatcgaatcaaatcacgcaaaggtgtagtggagcacgatcaggcacgggaactgctggaagaaggaaaatttgcacaggctgctgaattgcttgaaggcatgtcttctgattatcctgattacttggctgcccgtaacaatctggcactcgcctactattatatgggtctgtttcccaaagcaaaagagaccattgccgaagtgcttgaacaggaaccaggtaatctgcatgcactctgtaatttggccattttccatcaaaatgagaaccgggctgatcaagtgctgcttctgatcaaaaaattgcgggtcatcgtgcccttccagcacgaacaagtctacaaactggcgacaacgatgggaattctgggccaacacgatacggcttatgttcacttccggcgtttgctcaaggacgaagagacagctgctgatccggcacttgctcactatgcagccgtggcggcttataatacagaacgttatgatgctgctgagcgtttatggcatcatgtgtccaagcttgatccgggttccgaagtatcccggtattatctgtcaggtcttgaggctgtaaaacaaggcgagcaagagccagagaagctaagttatcactatcatctgccatttgatgagcaattcagacagtgggagaactacggtagtggcatacctgaagaaatgaagaatgatccactgattcgctcatccttcttctgggcattgcgtcatggtgatcgggcaaccaagctacaggttattcatgcgcttgggatgatcggtgactatgaggtgcaacaggctctgcaatcctttattgaagagcctggagaagaacaggatctgcttgaggtagcacaaactgtactgaacggattgaaatcggctgaacatgaggatcgtaatactcaggtggttcgacccttttctcctgtagccttgaagtctattgggaaggttcaatccacatcagagcaatcggacactggatcaacctcccattggcaagctgttgttgatcgtgcgttacagatgtctgaagcaaaggctgagttgcagcaagagatggaacggctctggacggattatgtatcccgggtacatccggaggttccgggtacgaagcagattgagggttgggctgcaggacttgaatatttggcagcgaagaatcacagtcggcccgttacctatcaaagcattgctgagcggtatgggatatcggcatcaacggttagcaagtatgctaaacagattcattcggtttgtaacagcaagccaccacttgtatagaaagttcgcttcaactcgttttcagaaagacatcatcaggtgaaggatacaacaaccgggaaaacgggtaaacttaacgaatgggcttcgtaaacgcctgtaggatatcatcttggcaagttcatcgctagtacaacacattctcaccttaattaaggaggctgtatctatatgtctaaatacagaacgattgtgatcggaacgggacctgcgggtctgacagcagcgatatatctggctcgtgctaatctgaaaccactggttatcgaaggtcttcagccgggtggtcaattgacgacgacaacggaagttgagaatttccccggtttcccgcaaggtatcatgggtccggaactgatggacaacatgcgtaagcaagctgaacgttttggagcggaattcaaaaacggttgggtggaagaggttgatttcagcaaaccgcccttcaaggtcaaagttggaggaatcggtgaactggaagctgaatcgatcattatctccacaggtgcttccgctcgttatctcggtattccgggcgagcaggaaaatgtgggacgtggtgtaagtacatgcgcgacatgtgacggtttcttcttccgtggcaaaaaaatcgtggtcgtgggcggtggagactccgcgatggaggaagcgagtttcctgactcgttttgcaacagacgtgacattggttcaccgccgggatgaattacgtgcatccaagattatgcaggatcgggctcgcagcaatgaaaaggtgaagtgggcgctgaaccgtactccactcgaagtcgtaccagaagctttgggtgtcaaagggctgaaagtgcgcaacaacgagacggggcaggaagagttgcttgaagcagatggcgtattcgttgccattggtcacacaccgaataccggattcctgggtaatgcgattgcactggacgaacatggctatgttgtcgttaaacccggaacaacggagaccaatattccaggtgtatttgcctgtggcgatgttcaagatacgaagtatcgtcaagctattacggctgcaggatcaggatgtatggctgcaatggattgtgagaagttccttgaaggaagcattgtccatgattggagcgaaacgttggataaataagcattacatgcgtgaggttaggcatatgctgggaataagagacaacgggaagtctcatgaaatgagagaagccggaaggcttctctttttttgaaactacagtgggcatgagatcgtatacatatagggcatattagctgtgaggtgaagattttgggggaaatgataaaagattggttacagaatgcgacagtgagacgatttttgatcctgctcttgttctgtttaattttgttcagtatggggagtatgctgcacatgattctgctgttgttcctggtgacgtatgtcatgaacaggttacagcatttcattacaggtggtttgaatcgtttgtttccaatcaattataaagttgtagtcatcctactctatatgattgtgatcgcagtcattgtgcttggcatttccagatattcaccacggatcgtggatcaggtcgtccagttgacaaacgagattatgaaatttctggatagtgcagacggtgataattttgcatccaaaattgcgggttatcttcaatccttcgatattaaaaattacaccaatgatgcattgaaatatattttcgctttgagcaaatggctggagtttattctgctcgttatcattctgagtctgttcttcttgttgcagaagcaggagatatccaagttcacgtccaagttcaaaacaagtaaaattggatggttctacaatgaagttgcttatctgggagacaaattcgtatcttcttttggtaaagtcattgaggcgcagcttcttattgcggtgtttaatacagtactgacgatactgggcttatggattctgggtttcccgtatctgttcgctctgaccattctggtgttcatgctcagtctggttcccgttgcgggggttatcatctcacttgtaccgctctgtctgattgggtatcagatgggtggactgaaattaagcattattgtgatcatcatgattattgttattcatgctttggagacgtacttcctgaatccaaaactgatggcacacaagaccaaattgccaatgttctacacctttatcgtactaattctgtcgcaacactttctggggatctggggactgatcattggtattccgatctttgtcttcctgctcgatattctggatgtgaacaagatggagaagacggaagagccggtacgtgtggaaacgaagttataacgtagagaaatcaactgagtcagcccaatttctacaatttcagattttcataaaagtaagggagccttcctgtggatggaaggctctttttttgttggcaataccgtcattagatagctttctgcgtaagaatgacaggtggcgggtgcataagatgagtcacctatatgaggggacgatgttgatcttttatgaatggaacgagtgaagatgcaatatcatgagttgaggcttcctctgttatagaggaaggaatgaagcgtgcgtttataaatgaaggtaatgaggatgtatacgtattcaaaaacggtgtgtgatgtggttcacaaccccggcggagcaggaggtactagaggtcttctcgtcttgacccaggcgtatccttcaattatagttggtacgtaggacttaaactattttagatagataaaggtggcttgcagcatgtctgagaaaatctacgttggggtcgatctcggcggaacagcaatcaaggtcggtatatgcgatgaacaaggtcagctaatgcatacgtatgaaggaccgactgaagtggataagggcgtagacacggtcatcgccaacatcgagaagtatgtccgacatatcgtagccgaatcaccttacagttgggaacagcttgagggtgtaggtgctggagtggccggtttcacgaatgtacgcgagggaattatcgttcatgcccctaacatcggatttcggaatgtggccattcgttcgattctggaagaacgtctgggcaagccaatcaaaatagataacgatgcaaacgtggctgcactgggtgaagtctgggcaggtgccggcaaaggcgtagacaactgcgtatgttatacactcggtacgggtgttggcggaggcttgatcctgaatggtaacatttatcagggtttctccggtatggcgggagaactgggtcatatcagtgttgtacctgatctggaagccatcaagtgtggttgtggtaaaatgggatgtgtagaaacagtatcgtctgcaacgggtattatccgtatggcaaaggatgccgtagaacgtggtgatcatacgtcactggcacttgtcgacaagattgcagccaaagaagtatttgatgctgccaaggcaggcgatgaagtggcacagcgcattgtgaatcgtgcggccttttacctgggcaagtccatggctactgtagcagctgtcattaacccggagatgttcatcatcggtggcggcgtatccaaagcgggcaatttcttgtttgatgaaatccgtactgtgtttgctaagctgacgccagaaccgttgcaagatggggttcagattctggaagctacacttggtaataatgcaggtattgtgggtgcagcaggtcttctcttgcgttcctagtatcctcgtaacaatatatgaagacagcaatatgataaggaggggacatttatgcttgaaggtgaaggatcaccaggcacaggcgccacgctcattatcattacgggcatgtccggagcaggtaaaaccattgcagtacaaagcctggaggatctgggtttcttctgtgtggataatctgccgccggtattgattccaaaatttgcggaactaattgaacagtcaaacggcaagattggtaaggttgcattggttatcgatctgcgcgggcgtgaattctttacggctctgtccgagtctttgaactatattaaagatcattttaccattcattgcgagattttattcctggatgctacagattctgtacttgttcagcgatacaaagaaagcaggcgcagacatccactggctcctgagggcatgccgctggacggcatccgactggaacgcaagatgttggaggaactcaaaaactctgcgactcaggtactgaatacaagtacaatgaagcctgctcaactgaaagaacgcatcatatcccgtttttctcatctggaaagccaaatgctgtcggtgaatattacgtcgtttggattcaagtatggcattccgattgatgctgatctggtgtttgatgtacgttttttaccgaatccgcattatattgatcatttgcgaccgaatacgggacagaatagtgatgtgtacgaatatgttatgaagtggccagagacacaggcatttctgaccaagctgctggatatgctgcatttcctgattccgcaataccggaaggaaggcaaaagccaggttattattggaatcggctgtaccggaggcaagcatcgttcggtagcaatatcggaatatttgggcaagatgttgggaagcagcgagacagaagctgttaccgtgagccatcgcgacgctgaccgggaccgtcattgaagagggtgaagggatgaaagaggccggaccacgaagagaacgtccgagaatagttgtaatgggcggcggaaccggattatccgtgatgctgcgcggtttgaaagagaagccgctggatatcacggccatcgtcacagttgcagatgacggtggaagttcaggcatcctgcgcaatgagctacagatgccgcctccgggcgacattcgcaacgtgcttacggcactggctgatgtagaaccattgctttcagatatgttgaagtaccgtttcaatacaggcgcggggcttgcaggccacagcttgggaaatttgattttggctgcaatgacggatatttcgggcgactttgtgaccgcagtgcgggagcttagccgcgtgtttgccgttcgaggtgaggtattgccagccgcaggccaggccgttgtgttgcatgccgagatggaagatgggacaattattacaggtgagtccaaaatccctgaggcgggtggacgcatcaaacgtgttttccttgaaccggatcacgtggagccgttgccagaggcagtagaggccattcgtcaagctgacgccattctgatcgggccaggcagcctctatacaagcatccttcccaatctgctcgtacctaagcttgcagaagctgtggtagaggctgatgcggtgaagatgtttatctgtaatgtgatgacacagccgggagaaacagataactatacggtaagtgaccaccttaaggcggtacacgagcatataggtcatcagctcttcgactatgttatcgtaaataatggtgacattccgctgcaagtgcaaaataagtatgcggaaaaaggagcaaaaccggttgtactggatatgaatgtactcgaaagtgccggttatcaggtggttgcagatacccttgttctgttcaaaacctatctgcgtcatgatgccgacaagttaagtcatcacatctaccaactggtacaaaattggatgttacggaagaggtgaagtcccatgtcgtttgcagcacagaccaaaaaagagttaaccatgatcgagagcgaaccgtgctgcgaaaaggcggaactttcagccctcatccgtatgcttggtgcagtgcagttatcgaataaaaaagtgatcttggatatttcgacggagaatgccgcgattgcaagacgggcatactctctgcttaaaaagcattttcaagtgcatacggaattactggtccgcaaaaaaatgcggctgaaaaagaacaatgtatatattgttcgtattccaaccatggtacaggagattctcaatagtcttcatattgtatctgagggctttctctttaccccagggatcagtacggaattgtttcagcaaaactgttgtaaacgggcctatcttcgcggtgcatttctcgcaggtggatcggttaataatccggaaggttcctcgtaccacctggagattgcgtctatgtatgaagagcactgtcaggcactggttgacctggccaatgaatttcatctgaatgcccggtgtatagaacggaaaaaaggattcatcctatacattaaggaaggcgagaaaatcattgagctgctcagcatcattggtgctcatcaggccttgttcaagtttgaagacgtacggattatgcgcgacatgcgtaactccgttaatcggattgtcaattgtgagaccgccaacctgaataagaccatcggagcggcggtgaggcaaatcgataatatccggttgttacaaaaggaagttggtctggaatctttgcctgagaagcttcgcgaagtggcggaagttcgactcgctcatccggatatcaacttgaaggaagttggcgagctccttaaaggtacagtcagcaagtcgggagtgaaccatcggcttcgtaaaattgatgagctggctgagaaagtacgcacagaacgttatggttgagacggggtagggtaaagtaacaaggtcggctgtttctgctgaacagaaaagtcgggaaagtcaactgttaaggaactaggggacttacttaggtcattggatgtgctgtgcaaaagatgaaattagggcaagataatgtcctccaaagcaccctgagttttttcttctagtgtcctgcacgggttaatggtataatgttgtttaaatataattgtgtatttaatgtccagatttcataatagggggtaagtttccatgacaaagcacccggtagttgtccgtttgaaaacgggcctccatgccagacctgcggcactgttcgttcaagaagcgaataagtactcgtctgaagtgttcgtcgagaaggacgacaaaaaagttaatgcaaaaagtatcatggggatcatgagccttgcaattagcacaggtacggaaatccagattagtgcagaaggcgcggatgccgaacaggctgtaaacgctttagttagtctggtaagcaaggaagagctcgaaaaccaataagatatgatcaatctaatgaagaagtcccgaaaggggcttttttgtgtttttcacgtttatgctatcgtcaagtgcaacattatggaatttgtcccgtctgttaaggtatcaaatcgattaaagtttgagatgttaacacataaggaggctatcgtgatgggtaaacaatggatgaaaccgtttggtgcggtgctggtcgcaagtacgttgcttgtaggaggaacggcatgggttgcaccaggtaactatgcttacgctgcagaggttcagggagtacaacagaatgtgattaatgttgtgggtaaaggtgagattcaggtgaagcctgatatcgcgtatctgtccattggtgtgaacagtactgcagagacagctgcatctgctcaaaaagcgaatgctgccaaagttcaaaaagtatccaatttgctgaagaatacgtggaagatcagtgcagacgacattcaaacgagtcagttctctgtacaacccaactatacgtatagtgaaaaagacggacaacaaattaaaggatatacagcgcatcatacgctgacagtcacatatcgtcagatggacaagattggcgagttgctcgatgctgcttcgggtgcgggtgccaacaatattgaaaacgtacgctttactgtagaaaatccggaaagttatgaatcccaagtgattgaaaaagctgttgccaatgcagatgtgaaagcgggcgccattgcaaaagcagttaaacgtcaactgggtgctgttctttccgtgagccaaggtgatgccgatgtgcctgtattctatgcaagcgaggcgttgatgtccaaagcacaagatacagcaggtggtactgagattgaaacaggccaggttaaagtaagtacaatcctgaatatcacgtatgaaatgaaataaacaagagtgaactaaggattgtaaactcaagaacctttttaagtgtcacttgaagggtacaacgaaataatgacaaagactttgtcctgtggacagagtctttttttgttggaaaagcaaactttgatgaagttatatagaagggtacctttttgaagcaacatgaaatgctgtatattggtatcttttttgtatagttgttcgtgacaaaaaggtcatatccccatatattttcctactgatattcatcaacattgtaactcgagctgtaaacctttccgaaatcgggttaattataatagagaggtgagcgtatgagatatgcgatcaggtcaggattacatacgcaatgatccctaattgtgaattcagagaggagttttatatatgacatcatggaaaaaatggacaagtgcgttgcttgcagcaggaattattgtaggtagcggttcggtgtggcaggacagttcggttcaggcggcatcggtatcctcgaaagtgataaccacagctgaggtgaccctgaagtcgggtggaaaaacactgactcaaaaaggacttcttcaaggtggttcaacttgggtatctcttacggcagttaaagatgtggcaggtggaacgctgaaatatgatgcgaaaaccaagtcatatacggtaacagcagccaacaatgcgatgaccgttagcctgatggatggacagccaaacgtttatattaacggttattaccctcaggtggaagcgaaattgattcagggtcgattgtatattccattctcagcaatgagagattatctgggtgtacaggggaattgggatggcaaaaccaaaacgttgacactcagcaaggtgaaacaaaataacgttaaaattaaagcggcaacagttaatgtcactgtgaaaaatgctgaagtagatgttcaatatccacaggtgagtggacttgccagcaaagaagctgaagcggcgatcaataaagtgctgaaagacgaagtggatgcttatgtagctgacttcaagaaacagacatctgaattcggcggtgcaacagccaaccgtccatatgcatttgagagctcttatgtagtgacgtacaacgaaaaaggcgtgctgggactcattacacaacgatacgaagattatgctggcgctcatggtatgacataccgtacgggccacacctttgcactggacacaggcaaggagcttacgttagatgatgtgctgcaaaataacaaaacgatgcgcgagacgttgagtaaaaaagtgggtgagcaactgaaagcccgcggtggatacctcgacggttataaagggttgaataaagatcaagattactatgtgacaccaacgggtgtagttgtgttcttccagttgtatgagtatacggcgtacgcagaaggcttccctgaaatgccatttacgtacaaagagcttctccctaaaggcacagaacctttcagtaatgtatctggaaccaaataaagaatcattattgtgcactcttaagttatcttccttataaaatgaaaaaagaagcccccatcataattatgatgagggctttttctcgtatagacaacacaattatatgttgctgattacgttaggtgttgattatgttaacgcatagaccgtggtctacgtcacacttagatgccttgtgatcctacgttttcgatgactttatcaatgataccgtaatcggcggcttcagcagcactcatgaagtagtcacgatctgtatctttctcaatccgctccagcggttgacctgaacgctcagagatgatgcggttcaacgtatcacgcattttcaaaatgcgacgagcacggatttcgatgtcagaagcctgaccttgtgcaccaccaagtggttggtgaatcataatttcactgtttggtaatgcaaaacgtttaccttttgcaccggcattcaacaagaatgcacccatggaagccgccatacctacacagatggtagatacatccggtttgatgaattgcattgtatcgtaaatcgccataccggctgtaatcgatccgcctgggctgttgatgtataagtgaatgtctttctccggatcttccgcagccaggaacaacatctgtgccataatggcattagccactacgtcattaacatcgctaccaaggaaaataatacgatccttcagcaatctggagtagatgtcgtaggcgcgctcaccccggttgctctgttcaacgaccattggaataaaactcacgtgaaaaacctccttggaatgtaaatgttattggtgtttatacttaaactgttaccgtattacccacataataaacaattccaaacaaaaagtcaaagaaagtcaaactgacttgcaaaaaaaagaaacctttccggtttcattggttaaatgggttatgagctgttaaataaaaatggcgcgcccgccaagaatcgaacttggatctcaggcttcggaggcctacgtcatatccattggaccacgggcgcacattatgtgacagcaataatgattatagctcatgaaatatttaattgcaagcagttcgttgtggtattggtttggattaacctaaaaatgatcatgatgaagaagagtggataaagagtacatttaagtaaatgctattagaggttttggacatgccgtatgaaatgtgattcaaagcgatatgtagattgaattcatttgtttcttctatatatggtatgcgtgagctagtcctagatcatggaagtctaagattgtgaaaataggcgcgtacaaacgctgaatgcgtgtcgaaataacacgttgaaacacttgcatgtcgcgtcagttttaggtagaatagacgtgggacttaaaaagttaacccgggacgttttagggccacgaaagagagcttagaacgagaacttgcgggagtggaaagcatgcgaacgattttagaagtacaaaagcagcttctgcctgatctcatggatatcttgaaaaagaggtatacgattctgcaacagatcatgttatcggatgtgatcggacggagaacgttagctaattccatgcagatgaccgagcgggttctgagggctgagaccgatctgttaaaggctcagggacttattgaaattgacagtgcaggaatgaagatcagcgaggcaggttatgatttgctgcagcagttagagcccgtagccaaagagctgttcggattatccgagctggaagagcgcatcaagcaagcctacggtctgcaaaaggtagttgtggttcctggcgattcggacgtttctccatttgccaaaagggaactgggcagagccggagcgaaggctctcggcaatatcatgagtgacaacgacgttgtcgccgttactggcggttcaacaacggccgaagtcgcagaacaactaaatccgccaacatcgctcaaaggtgtctggttcgtaccggcacgcggtggacttggagaaagccttgaaattcaggctaatacgatcgcatccacaatggcaaaacgggtaggggcgcaatacaaactcctgcatgtaccggatttgctcagtgatcatgcctatgaatcattaatccaggaccctagtgttcaggagattctgcagctgatcaggcaatcacggattgttattcatggaattggtgatgccgtagagatggccaaaagacgcaaacttgcgacggagattatagatgaacttcaggagcaaggggccgtatctgaatctttcggttattactttaatgatcagggtaaggtggtacataccatgcttacactgggtatgcgacttcaggatattgaacgaaccgatgttgtgattggaattgcaggtggcaaaagcaaagctgctgctatacattccgtgttacgatttggtcaggaagatattctgattattgatgaggctgctgccgaagtcatcgttgctgaaatggaataaggttttactttgcatcacaactattgttgtcttgacggacttcaccgtctgtcttgaatatataagtttcataaaaaaattaatcaaaacttgggaggaacttactcatgattaaagtaggtattaacggttttggacgtattggacgcttggcattccgccgtattcaaaatgtagcaggcatcgaggtagtagcaatcaacgacttgactgacgctaaaatgctcgctcatttgctcaaatatgatacaactcaaggtcgcttcgatggcgatgttgaagtacacgatggcttcttcaaagtgaacggcaaagaagttaaagtattggctaaccgtaacccggaagaacttccttggggcgacctgggcgtagatatcgttctggaatgtactggtttcttcacaactaaagaagcagctgagaaacacttgaaaggtggagctaagaaagttgttatctccgcaccagctactggcgacatgaaaaccatcgtttacaacgtaaaccatgaaatcctcgacggtactgaaactgtaatctccggcgcatcttgcacaacaaactgcctggcacctatggcaaaaacactgcaagacaaattcggaatcgttcaaggtttgatgactacaattcacgcttacactggcgaccaaaacacgttggatgctccacaccctaaaggtgacttccgtcgtgctcgcgcagcagctgaaaacatcatccctaacacaactggtgctgctaaagcaatcggtctggtaatcccagaactgcaaggcatccttgatggtgcagctcaacgtgtaccagtagctactggttccctgactgagctcgtaactgttctgaacaaaaaagtaactgctgaagaagttaacgcagctatgcaagaagcttccgatccagaaactttcggatacacagaagacgaaatcgtatcttccgatatccaaggaatcactttcggttccctgtttgatgcaactcaaactaaagttctgactgttggcgaccaacaattggttaaaactgtagcttggtatgacaatgaaatgtcctacactgcacaattggttcgcactttggagcactttgcaaaaatgattaagtaatatctgtaataacatagagcggaaacagatgctatattgtttccgctctttatatatctacattttgcaaatttctcaaaaacaccaggattgacgagggattttagctcttgattggtccaccaaatacatgggtgcggaggaaatacagatgaacaaaaaaagtgtacgcgatatcgaattgacaggaaaacgggcttttgtccgtgtagatttcaatgtgccgctcgaagatggtaaaattacagatgacaaacgtattcgtgcaacgcttcctacaatcaacttcttgattgaaaaaggcgctaaagtcattttggcaagccacatgggtcgtcctaacggcgaagtggttgaatctttgcgtttgactccagcagctgagcgtttgtctgaattgcttggtaaaacagttgttaaagctgacggttctgttggtgacgctgttaaagctcaaatcgctgaactgaacaacggcgacgtattgttgcttgaaaacgttcgtttccacgcaggcgaagagaaaaacgatccggaactggcaaaacaatttgctgaactggctgacgttttcgttaacgatgcgtttggcgcggctcacagagcacacgcttcgactgaaggaatcgctcacttgcttccagcagtgtccggtttgttgatggagaaagaacttgaagtgttgggtaaagcaatttccaaccctgagcgtcctttcacagctatcattggtggatccaaagttaaggacaaaatcgatgtaatcgacaacctgctgaacattgcagacaacgtaatcatcggtggcggtctgacttacacgttcttcaaagcacaaggacatgaaattggacaatccttgctggatgattccaaacttgatgttgctctcggttttatcgaaaaagcgaaaaaattgggcaaaaacttctacctgccggtagatatcgtagtatctgacgatttcagtgcgaaagcaaacacacaaatcgttgacatcgatggtatcccagcagattgggaaggtatcgacatcggtcctaaaacacgtgagatctatgctgatgtaatcaaaaactccaaattggttgtgtggaacggaccaatgggcgtatttgaaatcgagccattctcccacggtactcgtgcagtagcggaagcttgcgctgagacagaagcttacactgtaattggtggcggtgactccgcagcagcagctgagaagttcaaattggctgacaagatgaaccacatctctacaggtggcggtgcatcgctcgagttcatggaaggtaaagtacttccaggcgtagtggcattgaacgacaagtaagttttagtagcctatagcatgaaggagttgaaacccatgagaacaccgattatcgcaggtaactggaaaatgttcaaaacggtttccgaatccaatgacttcattcaggaagttaaaggaaaagcggaagttgaaggcgtggaaactgtaatctgcgcaccgtttacaaatctgccatccttggtagaagctgttaaaggcacaaacatcaaaattggtgcacaaaatcttcattttgaagataacggtgcattcacaggtgaaatcagcggcgtgatgctgaaagacctgggtgtggattatgtcattattggtcactcggagcgccgtcaatattttgcggaaaccgatgagactgtcaataaaaagttgcatgcagcattccgtcacggattgactccaatcttctgccttggtgagacgcttgaagagcgtgaagcgaaccaaacaaaagacgtatgcaaagtgcaaacagtagctgcttttgcaggtctgtctgcagagcaagcggcacaagttgttatcgcttatgagccaatctgggcgattggtacaggcaaatcctcgacttcccaagatgcgaatgaagttattgcttacatccgtacgctggtgaaggatctgtacaacgagacggttgcgaatgcagttcgtattcaatacggcggcagtgttaaaccagagaacgtaacagaatacctcggacaaagcgacatcgacggcgcacttgttggcggtgccagcttgcagccggcttcgttcatcgcgcttgttgagggggcgaagtaagatgacagctccaaaacctgtagcactgatcatcatggatggctttggtctgcgtaacacggtggaaggcaatgcggtagcgcaagccaagaaaccgaactacgaccgtttcatgagccaattcccacatacaacactcactgcttgcggtgaagctgtaggtttgccagaagggcaaatgggaaattccgaggtaggtcacctgaacattggtgccggccggatcgtataccaggatttgacccgtatctccaaatccattcgtgacggcgagttctacgacaatgaaacacttgtcaaagccgttcgcgaagcgaaacaaagcggcaaaaaacttcatctctacggcttgttgtctgatggcggcgtacatagtcacatcgaccacctgtttgctatgctggatctggccaaaaaagaaggaatgaatgatgtatatattcatgctttcatggatggccgtgatgttatgccagacagtggtaaagacttcatgcagaaactgatcgccaagattgaagaagtcggtgtaggtaaaatcgctacggttcaaggtcgctattacgcgatggaccgtgacaaacgttgggaacgggttgagaaatcataccgtgccatcgtttatggagatggaccaaaatacactgacccactcaaagcggttgaagaatcgtatgagaaatccgtatttgatgaattcgttgaaccaacggttatcgtcaaagcggatggtgagccggtaggtttggttgagagcggcgattccgttatcttcctcaacttccgtcctgaccgtgcgatccagttgtcgcaagtattcacgaaccaggatttccgcggttttgatcgtggtccgaagttccctgtgggcttgcactttgtatgcttgactttgttcagcgagacggttgaaggttatgtggcttattcgccgaagaacctcgacaacaccctgggtgaagtcctggtacagaacaataaaaaacaactgcgtattgcagaaactgagaaatacccgcacgttaccttcttcttcagcggtggtcgtgatgtggagcttccgggcgaaactcgcgtactgatcaactcaccaaaagttgcaacgtatgatctgcaaccagagatgagcgcgtatgaagttgctgacgcatgtgttcgcgagatcgaagcagacaaacatgacgccatcattctgaactttgctaaccctgacatggttggacactccggcatgctggagcctaccatcaaagcggttgaagtaacagatgagtgtatgggccgtgttgtggatgcagtacttgccaaaggcggcgttgtactgatcacggcggatcatggtaacgcggatatggtgttcgatgagaaaggacgtccgttcacagctcatacaacgaacccagttccattcatcgttacggatgccaatgtaactttgcgtgaaggcggaatcctggcagatatcgcgccaacgatccttgacctgatgcaattgcctaaaccggctgagatgacaggtacatccgttatctctactcgtaaataatataattttaataggttgtcgaataagacctaagttacaccttaacgaagcgggcagaaccgatctggagaagcgaagcgctcgcctttatcccctaattctcaccttttataaggagttcaaagaatttggggataacagcgatcgaaggacggtactgcacgcggagtggcttggtgaaacatgtttgttctgaacgtattaaaataaaatttcaaatttaaaggagattatcacaaatgactattatttctgacgtgtacgctcgcgaagtcctcgactcccgcggtaaccctacagtagaagttgaagtatacctagagtccggcgcaatcggacgcgcaatcgttccatctggtgcatcgactggtgcccacgaagcagttgagcttcgcgatggcgacaaatcccgttacctcggtaaaggcgttctgcaagctgttaaaaacgtaaacgaaacaatcgctccagaagttatcggtatggatgcattggatcaactgggtatcgacaaattgatgattactttggatggtacgccaaacaaaggtaaactgggtgctaacgcaatcctggctgtatccatggcagtagctcgcgcagctgctgacgctctggacctgccattgtacgtttacctgggcggattcaacgctaaagcattgccagttccaatgatgaacatcatcaacggtggtgagcatgctgacaacaacatcgacgttcaagagttcatggttcttccagttggagcaccaagcttcaaagaagctcttcgcgtaggtgcagagatcttccacaacttgaaatccgtattgagctccaaaggcttgaacacagcagtaggtgacgaaggtggtttcgcaccgaaccttggttcgaacgaagaagcaatcactacaatcatcgaagcaattgaaaaagctggttacaaaccaggcgttgacgtattcttgggtatggacgttgcttccactgagttctacaaagatggtaagtacacacttgctggcgaaggtaaatcttacacttccgctgagtatgttgaccttctggcttcatgggttgagaaatacccaatcatcacaatcgaagacggtatgtccgaagatgactgggatggttggaaattgctcactgagaaattgggagacaaagtacaactcgttggtgatgacctgttcgtaacaaacactgagcgtctgggcagaggtatcaacgaaggtatcggtaactccatcctgatcaaagttaaccaaatcggtacattgactgaaacatttgatgcaatcgaaatggctaaacgcgcaggatacacagctgtaatctctcaccgttccggtgagtccgaagacagcacaattgctgatatcgctgttgcaactaacgctggtcaaatcaaaacgggtgctccttcccgtacagaccgtatcgcgaagtacaaccaattgctccgcattgaggatcaactgggtgaactggctcaatacaatggtcttaaaggattctacaaccttaaaaaataagctggatatccagcttttacgggcaagccgggtaaccggcttgtcttttttatggcaacgaagtaatggtataacgtaaggatcacgcagatggtgaaatttagggcattgtaaaacctgtactacttgtagtacaaccatagctatgttacaattaaagtaactgtttttatggtgagatgtatgcccacatgggtaggaggtggaaagaatggatattgctttgaaattgctgctcgttgttttctcgatcggtctaatcactgtagtattactgcagcacgggaaaagcgctggtttggcgggtgccatctccggtggtgcggaacatcttttcggtaaaacgaaagcgcgcggattggatctcttcctgcaacgtgcaacggtggtactgggtgcaggatttatgattttgtctattgttgttacggtggcttccaagtaagaattggaactgctgttcaatgaatagcttaagctaatggcttaattgatgaaccttcgtttcgtgaagaaacgggggttttttaataaattcttacgcgtccaaacttttccaagaatttaatctatagactccatgattttaggtcttcttctcacttctgtttggttttccttccttaacatgcaacacacccctatcatgtatggtatgtccctcgcttattcgttacgcgaactcactccctataatgaatgtcatgtgtacagaaaattttcggatgtagtccttttccagatgcgcacagcacgtgtatcgcataaaatgtctgtagagatatgtgaaagcgtgatattagaggagcgcccggcgaccgcggtttttttgcgtagtacggatgggccggattgaattcgtgtatactagggtatgagatagtatggttgcactactacactctgcacaacagtgatattgtattgcatgaaaatggtaagaattccgatacataaagagatgagacttgcttacacttttatgtttcccgaggtgaatatattaatgataacagaacaacaattgctcgacttcatgcgggataccgcttataaacctatgacttatcaggagttggaacagcacttcgctattgaagatgcagctgatttcaaagcctttttgattatgcttaatacgctggaggaatccggtaaagttttgctgacccgtaacaatcgctatggcatgccagagcgcatggatttggtacgtggacgtttacaggctcacgccaaaggtttcgctttccttatccctgaggatcgggagcacccggatgtgtacattcacgccaatgatatgaaaagtgcgatgaatggtgatacggtattggttaaagtcacatctcaaggaccttcaggtggtcgtttggagggtgagatcgtccgtattgttactcgtgctgtgacacaagtcgttggtgtgttccagagccatgaggtgtacggatttgtcattccggatgataaacggattaatcgcgatattttcatcccacgtaccaactttgctggggcggttgatggacagaaggtcgtagccaagatcgtcagctatccggagggccgtgcggctgccgaaggtgaagtgatcgagattctcggtcataaggatgagccgggtattgatattttgtccgtcattcgcaagcatcagttgcctgaagctttccctgatgaagtggtagaagaggcggaaaaagcacccgactccatcacggatgaagagattgtacaacagggtcgccgtgatctgcgcggacttaacattgtcacgattgatggcgaagatgccaaggatctggatgatgctgtaaatgtagagaaactgcctaacgggaactaccgtctgggtgttcatattgccgacgttggctattatgtgcaggagaattccaagcttgatcaggaagcctacaaccgtggatgcagtgtgtatctggtggacagggttattccgatgctgccacagcgtctgtccaacgggatttgtagtttgaacccgcaggtagaccgcttgacactgtcttgtgagatggagtttaacgaccagatgaaggttgtaaaacatgacattttcacaagtgtaatcaaaaccaaagagcggatgacgtattccaacgtccgtaaaatccttgaaggtgaagagccggaattgctcgagcgttataaggatctggtagatgatttccatctgatgaaagagatcgctttgaagctgcgtgctatgcgtatgcgccgtggtgcggttgactttgattttgaagaatccaaaatcattgtggacgcagaatgcaaaccggtagatatcgtgaaacgggagcgttcgattgcggagcaaattattgaggaattcatgttggcagcgaacgaaacagtggcagagcatttccactggttgaaggttcctttcatttatcgtgtgcacgaagacccggatcaggaaaaactgcaaaatttcctcgcctttgcggcgaattttggacaccaggtcaaaggacgtggcaatgcgattcatccacgggcgcttcaatcgttgcttgaggatattaaagaaacgaaagaacaaactgtgattagtacgatgatgctccgttcgatgaaacaggcgaagtatgattctgaaatgtcgggtcactttggcctcgcggcagaattctatagtcactttacgtctccaattcgtcgttatcccgatcttgtcattcaccgggtgattcgcgaagtcattgaaaataatggtgcattgccggagaaccgtcaggagtatttggcagcacgtatgtccgatattgcgcagcagtcttctgaacgtgaacgtgtggcggtagaagctgagcgggatacggagaaaatgaaaaaagccgagtacatgctcgacaaagtaggcgaagagttcgaaggcatgatcagcagtgtgaccagctttggtatgttcattgagttggaaaacacggttgaaggcttgattcgcctgagcgcactcacggacgactattaccattttgacgatcagcatatggctctgattggtgaacgtacctcgaaagtcttccgcatcggtgatgaagtgaagatccgtgtggcacgtgtaagcatggaagagtatacgattgattttgaaatggtagatatgaaacctcgcggtgaacgtcctggcggcttcggtggcggacgtggcggtaaaggtggacgcccagcaagtggtggtggtcgcggcggtgtcaagggtggaccgggtggtttcagcggttcacgtggcggcaaaggaggctcatccgctgctggagccagccgtggtggcagatcaacggaagaaagcagcaaaggtggacgtggcggtcgcggtggagcagcgagtgcaggcgcaggctcatctggtggctacgcaggtaaaggcggcggcaaaccaaaaggtgagcgtcgtgctggtgatgctggaggatcaactggccggggcaaaggtgcggtgagctttggttttggctcaggtaaaggcggatatagctctacatcgggtggatcggatagtagttcaaccggtggacaaggaagtggcctgaacagcggcagcggtcgcggtgaaggaagctttaagtccggcaagggcggcagtaaaggtggcaaaagcggaagtggacgcaaaaacacttcgccaagcggcgtatttattggagagaatgcaactcctggtggcgctcaggaaggcggagcaccacgacgcaagcggaagaagagcaaaggtgcagctggtaacggcacggcagcttttgtacggaaaaagaaaaaataaagctaacgtaacttggagaaatggattacaagtcgttccttcaggttaagcgttggagaaaatagtcacttcagccggtgtgttgtttcgcacactctgaaagtggtgtaatgaggaggggcggcagaggtcgcctctttcttgattttaacagccgtacttgctacaattagggtctggcacgtggtaccttggtgcaacattgggtgcgctgctatagagcatggtaccggcttattttacggagaaggagtgaggacatgggcaagaatgatggacagagtaaagtgctcgcacagaataaaaaggcttcccatgactacttcattgaagatacgtatgaagcgggcatggtgcttaccggaacggagatcaaatctcttcgtaacggccgtgcgaatattggtgatgcatttgccaccattcgaaacggtgagattcatattcacaatatgcatattagtccttttgaacaagggaaccgaaataatccgctcgatccgacacgtacgcgcaagttgttgatgcataaagtgcagattcacaagctgctcgggctgtcgaaacaggatgggtacagcattgtgccgctgaaaatctatatccgcaatggttatgcaaagcttttgcttggactaggtaaaggtaagaagcaatacgacaaacgtgaaactgcggctaagcgggatgcacaacgtgatatccaacgggtactgcgcgagaagcagaaggtcgcacgttaagtgaagcgctgggcgtaaatgctttactttaggtgtataagttagttttgtaatggagatttgaagagtgatgtacgagttaaggagtctcaaggtttgtcctgcaatgggcaagattgaggcttttttatttgtgtttggggaaggtgatttgatgtgaatagccgaagtgtattgtgtggtgatttcctttgatatgtgttgaagggaagtcggtaggagcatggagcttggcgcgttgatgaatctaaatttttagcttttgcgtagtttgcctgaaacgtgggtaagatacttaggggccattgttcgtgagccgatctgggtaaactttacttccgattggcgacgcggtataatatgtagacgattgagcctgttgtattggataaccttgtacacatgctcagcctgctggaatgtattccagcaatctgtactatttcggtgatgtgtcctgtgttatgattactcatgtagcagacaggaatgccgagtttgaaagaagcatctttttaccttggaggaagaagatgtgcagcacctttgctccgtattcacggattaatcctggagcccttcttcattgagggggcgtttatggattcgacggggatagttcgagcatgggtagcgggtagtggggacgcgtccgctttatcaacgctaaagcctattaaacggcaaacaacaaacaaactacgctttcgcagcctaagaaactgtgtgcgtgcttctaccctgcatcgcccatgtgacagggataggggctaactagtagtgggatacgctgtcacatctccgcctggggtgtgctgaagaagacaatcaggctgacccaacgtatagccggttacggggcgatactcgggtgacatcaaaactgtgactacacccgtagaagcttatgtgccgttatcttcggacaggggttcgactcccctcgcctccattagagtcaaaaaccatcaaccagtaaatctggttggtggttttttagtttatgatataataaacagaaatttagattgggggactcaagatgtttgaaaatcgagaacagctccaagagattttgaaaaaagccaatcaacatgcacggaaacaagctaaagaatcaggtgcctctatttattatataaagaataacaaacgcgttcgtgaggatgctgccggtaataaattcgaaattacatttgatgctactgggaaacgccaggagtttgagtatcatgagtgaaatcagaccagtcatgacggtgtttgctggaaccaatggagcagggaaaagtacactcagtatgcaaatgagagagtggcttggtgaactggttgatccggatcaaattgcaagagagttgaagccagagaatccgcgcggtgctgacctatctgctggtagggaagctgtgaaaagaattcgatctctcattaaaagtggtataaactttgcaattgaaacaacattatccggctcatttgttttaaaacatatggaaattgctaaagaaaacagttacgaaatcgtcgtatactatatcggtcttgaggatgttcaaatgcatatagatcgtgtagcctctcgtgttgaacaaggtggacattggattgcagaagaagacattcgttatcgatatggtgagtcattgaagaaccttaaacctgctctagccatcgcagatcgggttactattattgataatacatatgagcctttaattgttgcggaaatcatgcagagtgatttgatctattgtgttgagtccatacctgcgtgggctaatcctgttcttacgggttactgatacttgggtgacattaaaactgtgattacacccgtagaagcttatgtgcctttatcttcgtacaggggttcgactcccctcgcctccaccaacctacttaaaaacgaacaccctgtacatctttggtggattctctattactatatggttcaaatagaaaaagcggatggttagatcatattctaactgtccgctttttctatttccaaagccgtcaacgcagaaattgtagattccagtttgagaagtgtcgaattgtagttcttatgatctatacgcaactggggatatttgctatgatgaggacaagtttatgttaataaataacaagaaaccatttcagggaaataaagaaaggtgagcaactgagtatggaaaagttggaattacatttaaagcgaaaccaggaatatagaatgtcggtttgggaaataagtcgctttttaatgaagttaaattcaagtttttataaaaattctttattaaacgaattaagaactgccttttcagaagggattcggcctgaggatgttttcattatggactcatcttttaaggctgaaaatataaacgataaattagaacgaattgagttaaactcttcaagtgaaatgatgcagttagtctatattggaaaacctatcttcttatacccttctgctgaaaacgtacagttgtttgaagtgtttagtgttgtagaaaaaattagagataaaattaatcagtttggatactcaaaacgtaatactgattggattttaagcgaattgataaatggttttgattttgaatctgtagatacacatcatgaagtaattaaatcgcaaatactaatggaaattgaaagaaagcgtgaaagtgaaatagataaagcagaaagtattttaaatgatatatttgaaaaatcaaaagcaaacttaaaagattatgagaaaaattctgttgctatagaagaagtcaaggaatctctgtccaatcagactgaaattaaaaataaaaggttgaaagattatttcaataagtttgaatattattttaataaagtaagcagaccgcttatatatattgtagacagaaaaaaaggaacatgcactctattggttgaagggcaagtaaacaaaaagaaagtggacgagaattttgtacagctaattgaatataaaaaaataaaccctgatcttgtttcattaggtgtaagtttaataggtgttcctttagtaactaaattactcaacaattcaagtcaaaaacttgttgatgaacaggtgcgagaatcaattgaattgaacaaaatgaagcaacaaacagaaatacttcaacaagagaaacttagagcagaaattgaacaattaaaactttcaaatcaagctagtcgggatgggcggaaaattaataattcatatataaaacatgaattgatgttgcttgaaaaaaagcaggaagataaggttgcagaactgcaaaaaacatataaatttgaaatcactgatgttaaacgaatagacagaacaatttgatgattgcgaagctgatacccatacatgatccgcagtctttcattatgctggtttcaacacggcaatcatctcccgttttgaccacgctgaggtcgttgtagagcgagggggaaatggttcatttacggttctggggaagttgttgaaggaaattgaacgcaagaaaaccaacggactttatattttggaacatctatccctttcatccttatcaatcttctgaaaacaggatgacgaatcgaacgccgactttggcagagttggaggatggtttgccatttgcgagacagcttatgcaactgaatcctgatgctgagatcgtggctattggcagaaagtcagcagacacgttaagctcccatctcattaaacatcaccatgttccccatcctgcaaatggaagggcagtacaattccaaaaagcagtaaggtcaattatctagcccattttgaactggaggaatgtgaggctgacatatgcattcttattgttcaagtgtcctacacataacgtagtgtcccatcatataaagattggttggtgaagctaaatgagtgaaaaatactggcttgtggtgcaatatccgctgaagagcgcgcagggcagcaaacgagatcattggttgaaggaaaaggtgatggaatatctggaaaccgttctgacccaggcggagttgggagaggtggacggatgtgatctgggtagccgagtggttgatccaaaggagtacgtaatgaacattttctgtgtggtaacggacgaggatcggagcatagcgctaattaaaaaagtgctgagggagagtcggctggattacacccgcatcctaatcgctacgatgccatatggcacagaaggaagctacacgctgaaatatgcctccaaaaaaggcgttaccgaattctcgctttgatcacgattccctgaatcatatcataacgaactctgtacttgtcctgctcgagggcagtttgcccccgacattttccccacttaaattcatcatacgagaaaacgataattagagttcccaaccttaaccactcgatcaacactctgtatgtagtaagattatgcccgtagatatcgtaaccttgctcaaaagtatgcgcatatcaaggtagactttatcatcgtcttttgtgtatttagatcctccgcgttccccacatcactctccatccagcacaaaccacaacttattatctgtacctccaacattttataaggcagtactccttgcggctccaattacgggggcccccacccgcagcattcacagcaatcgtcttcccaaagcctcattctacttcactcagtcatatcattcccaagtgataaaaagaattgttcctcctccaaacaccgtcctataatatacaattgttacaatccaagagagtggtggataacacaacaggtcatccgatcccaactgttaagcccattacacctcggaaccaaaggagggtcactgtgaaaaacagagcaaaggatgcaaaaacaaagacagaagaagcagcagaagaagatgcaacgattgaagcgacagcaaaagcaaaagcatcagatgttgagaccaatgcagaatcaaacgcaaatacgaaagcaaacacgaaagcaatctccagtgcaatgaagaagaagtggaccccccgtttcaaagcgttcattcaacgcaagcccaagacactcgcttttaaaattccgtttgcttactttgtcattattctgctaacggtggcgtttagtgcgttggttttgaatcgaatctcggaaaatgacgcgcaacgaaagatcaatgaagcatcactgcagacaattacatccattgagaccaacgttaatctgatgatcgagaacgtgaacaattattcgaaaatgattttctccgatcccaacttgcagaacctgctgcggcagggcaatgtgtactccaatttacagacacagtccaaggtcagcgcgtatttgaccaatcttatgcaagcggttccaattatcgattcagtatatatttacgataattccgggcaccgattctcggtcggtacacaggaatggcccacgtttatggaagcgaatgtgaaggaagcgccgtggtacgaacaggcactgaagcataacggaagatatcttctcaggttgaatggtggcaacaacgacagcggagtctcggcgacgggggagaatgatgggcaagaggtggtgtcgtttattcgcctcattcgagatttggatgatacgtctccacttggatttctggtcatgaacatcaaaggcaaatccatcgctcaggcctatgccaacctgtctgcaccggattcatttcaggtggccatcctggatgagcatcagcgggtgattgcaaccaacgctaccgatggaaagaagtccgtgcctgctgtatccgacgcatccatgtctaccgcttctggacaggatgggatgcacgagatgttagaggccaatcaggccaagttaaaacaaacctttcaagagcaatcctccggcttcatcaccttgcaatcgggtggtcaggaatatgcggtgacctatcgttcggctggtgatgatcagtggaaattcatcagcatgagtccataccaggctacagatacccgtaataaatccatggtgctgcttgcgttgattctactggcggtgaacggaacggtcttttttgtcagttcattcatcatctcgcgcagcgtcattaagccgattcacaagctacttcgttccatgcagaaagcgccaagcggcaacttccgcaaagtgacggttgagctgaacagctacgagttcgcacagctatatggaggatacaaccagatgattgagcagattgaccagatgttgaaacgcatcattcaggagcagcagacgattcgccgagcagagttgaatacacttcaggcgcagatcaagccgcattttctatataacacacttgattccattacctccctggcgatgtccggcatgaacgataaggtatgtgagctgttagaagcactcggaagttattatcggctgagtgtcagcaaaggccgtgaactgattacgctgcaagaggaggttgagattgtacgcaattatctgacgatccagcaggtgcgataccccggtgtatttgaggtgcagtacgatatcgattcaggctgtgaacgagtgatgattcccaagctggtgctccagccgttggtggaaaattcgctgtatcacggtattcgtcccaaaggcagcccgggcacgatacgcatccaagcttgtcgattcaaggagggagtacttctaacgatcactgacgacggagtcggcatgtccgaggaagaagtgaagcagattcaacgaacagaaatgaacaggtctaatcgctcgaactcatctaacccatctaacactcctaactcttctaatccttctaatcctacccataactctaaacacaatccaagctttggcttgtggggaacgatggagcggcttcgcattttctatgacagagaagatggactcaagctgcagagcgaagttggaaaaggaaccaccattatcataacgatcccgaagggagccgatgaatcatggaactaactatggaaccattaaaggtattgattgtggatgacgagtacctcatccgtaatctgttgcgcatgcgtatcgattgggagcagcaaggcatgagcatcattggcgaggcctccgatgctgaagaggctttgaatcaggttgagctgttgcgtccagacattgtgttcacggatatatacatgccaaagatggacggcattgaactgagcggcatcctcatggagcgttacccgaacataaaaatcgtggttgtgacgggacatgatgaatttgaatatgctcgtcagagtgtgaagctgggcatatccgattttattttgaaacccatccgtgcttctgagttattacaggttacgacgaagctgcgagcggcaatcgagcaggagatggggcgcgagtacgagctgatgaagctgcgggaggagatgaagcagagcctgccttatctcagggagaggtttgtgaatcaatggttaagtgacgtgatacctgaggatgaactacaagagaaggcgcgtttcttcggtattcctatctcgtctggtgaaccaggatcacgcatcgcagtaatggaggtggaggttgctgtaccgcaagctaagatagctgcatcagaggtatatcaacatctgtccgaaccatatcacccaacacaccaagcacaacgagggactcaacaacaacaacaacacggtcagccccaattaagccagcatcagacagaagcccatccacaacccgctgaggaaatacatattttgctccgaatggtaggcatgaagcaggtgcaggcattttatccgcaggattcgcaaaccattatcgtcatggacccacataaccggatagttgtactctcgcttggtgcggatacggaatttgctaatcgggtacagcagcttcaggaagaacttcaacatacccttaagctcgaagggcgtgaagttgatgtgaccgtagggattgggcaatggcaattaggatggggaagggcctgtgtgggataccgggaagcttgtcgtgcactcgattatcaggcgtttgtggggaaaaatcaggttatttgcttcgaggatctggtcatcgaaggcgggaaaaggccctaccactcagctgctcagctgctccaacaactgcaattttacgtcagtgttggtgcgggggaagaagccgtattgttgctggagcgtatgttgtctgtgccgttctcggacgtttcacagtttcggatggcagccatggatgtggttacggagtgccagcgtgccgccatagagcaacagcttgagggagagcacgcattgaacaaagaggccgttgcggccatttttacagcaggtcatctgcctgaactaaaaagcatgctggagcagcatgtccgcacggtatcggatgtcatacaagccaaacgacaggccaaggaaggtaatctgatcgaccgggtgatggcttatcttgaagagaacatgggcaatgcggaagtggggctttccagcaccgcggctgctttttacgtaagttcgggccatctggggcggctgatgaaaaaagaaaccgggcaaacatttgtggaatatatgacacagcttcgtatgaggaaggccgaaacgctgttgaagcagaccgatttaaaggggtatgagatcgggcagcaggtaggcatcccggacccacactatttcagcgtcttgttcaaaaaacatatcggccgatccatgaatgaatatcggaatgtaaaaacctgaaaaacgagaatgtaaaccccacactaccagttccaattccacatatgttcgaattttacaaatcgatgcctgttttctaaatggagaacaacgcacggttcgcctaaaatatgggctagaaccaactaaaacacatagggaggtccatagagatgaaagcgctattaaaaaaatcagcaagtctaattctgactctgggaattgtaagcagtctggcggcatgttcatccggttcgtccggtggtacacagggggaaagtaatagcaagatcaagctgacgctatgggatcaatcagttggcaataccgatccttcggccaaactgctgcccgagattgttgagaaatggaacagcgagcatccggacatccaggttgaacgtacgggcacgacaggagaacagtataaaaccaaagtcaaaacatcgattgcggctggtgaggcgccagacctgttctatggcatgggtggcggcagcttcatgcagccgtacatcaaatccggcaatgtgctggaaatctcaagttacctgacggacgatatcaaagaacgaatgggcccgggaatggctgaggccattaatatggacggcaaaatctacacattgcccgtgtacacacatatcgccaatctttacgtgaatacagaactgttcgagcaggcgggtgccaagattccgaccacctataacgaactgctggatgcagtctccaagctgaaagcggcggggatcaccccggctgtgattggggaaaaggaccgctggccgggcatgtactggtacgacgttattgcgatgcgtcaggcaggcaatgctgccgtgatggaagcctttaaagatccgtcgaaatgggattcgcccgactttgtagccgccgcgaccaaaatgcagcagcttgcacaagcaggagcattcaacagcagcatgttcagcatgagctatgacgagatgctgggggcatttaatgcaggcaacggggcgatgatgttccaggccaactgggtgaatgctggaattgaggacccgtcctccgcagtcaaaggcaaagtgaaagtgattccgttcccggtgtttgaggatggcaaaggcacaaataccgaaatcttcggcggagccgtcgatggtttctacatcaaccagaataccaaacattcggaggaagccgtggaattcctcatgtatttgagcgagcaacttggtacacaaggtttcctggctggagcgggtctgccaagctggaaaacagatgcactcgacacgtccagcctgtcctcccttgatctgtctgcggcagatattatgaaaacggcgacctcattcattgcgtggtgggataacattctgccagcggagtctgccgaagcgcacaaaaacatgattgcccagctgcttgccggcgatgtaacaccggaggagttctgcaaacagatggcacagctcaaaccaacagagctaagtctatagaaaacaggtaggcaggtatacgtgcgtgcaagcttacaagcttaaatgcttacaggccctaggtccttacactacaagtctttgcaaattacctgtgaataccttacgcgtagaccttgtgagcatgcacggctaccgcttctaaccatgaagatgaacccaaacaaggcgtggtccggaatatcccggtcacgcctttgagaggagaacaacaatgaactctgtattttccaataaaggtacgatagccgtctttgtactgcccacactgattctcttctgcggcattgtgctcattccgatctttgtctccagttattacagtctgctggactggaacggcgtaggcaggggtacatttatcggcctggacaactatgtagagatgtttaaggatacccgtgtgctgaattcgatcaagaactccctgttattcgcgggtgcttcggtgttcattcaactgccgatctcgctggtgctcgcactgattcttgcgtccaacatcaagggagaaggtttctaccggaccgtgtatttcatcccggtgttgatctcaacggtggttattgcccagttgtggtcaaaaatctacaatgccgattatggtctgctgaacgtgctgctgcaaagtatcggcttatccagcctggcacaagattggctgggacagaaggacaccgcgctggcggcatcgtttattccgaccttgtggcagtacgtggggtatcacatgctgctgatgtatgcaggtgcgaagtccgtgtctcaggatgtgctcgaagctgctcgaatggatggtgcttcccgtattcgcacggcgtggtccatcatgatcccgctgatgaagcccattctgaaggtaagccttgttttttcggtcatcggtgcattcaaggtgtttgacctgatctatgtgctgacaggtggcgggccattttacaccactgaagtgccaagcacgctgatgtacgctaccatttttgatacgttccggtacggatatggcagtgcgatctcggtctttatcattgtggagtgtctggtgtgtacgatcctcattaattcattgttcaaaacggagtagagggaggcataaggcatgagtaccgtagaagtcatgttgcaaaaaaagcccaagccgaggtccatctccggaccgatcgggaaagtgttcctgcaagcgtttctgatcctcgttgcgattgtgcagatttacccgctcatctggctggcgctgttttccctgaaggataatagtgagatcttcagcggtgatgtagccgggttgcccaaagcgtttctgtggagcaactacaccaaagcaatgtccgacggccatgtgctgacctattttatgaatagtgtgctggttactgcggcctccattgtcttggtactgatcctgtcctccatgacgggatacgcaatcacaagaatgaactggaagctcagcgggttgacgatgacgattattttgctgggcatgatggtgccgattcatgcggcgctgctgccattgtttattattttgaagaatctgagcctgctcaacagttactggtctctgatcattccttatgtggcatttggcattccgatggctgtattcattctgggcagttttttcaaaggtatcccaagagagatggaggagtcggcggttattgacggctgcggcatataccggacatttttctccattatcctgcctctggtaaccccggctatatcaacggtagccatcttcacatttctgtcatgctggaatgagctgatgtttgcagttacgtttatcaataacacggcttatcagacattgacggtgggcatgatgtcgatggtgggaacgtacattacgcaatggggtatcattggtgctggactgatgattacgacggtgccaacggtggtcatctatctgctgctgaacaaacaggtgcagaagagtatgatcgcaggtgcaatcaaaggttagctggaggctggactggaggacgtggcggtagaagggcttgttgctcgctcgctgtgctctctttctggtgggtatcggcttgattcggaatttcgcaaggtgtgatctctggactagaccggagcctgcggtcatggaataataagggggtatgtagctaggcagttgcagagagggggcattatttatggtcaatatcgcgatggtagagcaggagtctgttcgggaaaaggttgtggcgttcacgtttgatgatgggccgcatccggtgtatacacctcaagtgcttgagattttccggcgtgccggtgggcgggcgacgtttttcatgattggccaagagatggagactcacccggagattacggcggaggtgcaccgtgaagggcatgagatcgccaaccatacgtacacgcatccggatctgaccaaattgacgctggaggaagctggggaggagctgcaacgcgcagaaaatcttgttcaagaagttacggggcaacctgcccgctgcttccgcccgccgtattttggcgtaaacgatgatatactgtctctggcggcggagcgtggatatcggacgattggtgcggtaaacggtgatgcaagggattgggacaatcccggcgttgagcacattctggagcatacccggtctgcggtgaaacccggcagcgtgctcatattccatgacgggtacggggatcgttcccagacggtggaggcggttcgtgtgctggtggatgaactggtcgcggaagggtaccgtctggtgacggtgagtgagttgctggacatttctcgtgatcatgatgcaaagacgacataattaagtggacccatcattctttgaatgacagggtctttttttaatatatataatacataggaagaatgaagtggaagcacaaactttgcttgccctctcaaactactttataataataggctaaactagattatgtcaggaggaaacaatggactttatcagaaatcaactagaagaactcggcatgagtggaccttccattggttatctttcaaacatcattatgattatttttatagcagtgatctcgatattggcgaatgtgattgccaagcgagtggtactgaagacggtccatcgtatcgtaagtaacaaccgtttcaagtggggccatattgtggttcagaaaaatttatttcagaagctgtcgcatcttgtgccagccattataatctattattctgcttatattttcacgccctatcaggccataattgaaaaatcagcaatgacctatatgattgttattatgattacggttctgaatgctctgctgaatgtgttcgatgatatctatcgtacctatgaggtgtcgaagattcgcccaatcaagagttacattcaggtagccaagattgtcctgttcattatcgggggcattatcgtcatctccagcctgatcggacagaacccgctcattatccttagtggacttggggcgttatcggcggtattaatgctcgtattcaaagactcgatcctgggcctcgtggcgggtgtacagctatcgtcgaacgatatggtgcgcgttggtgactggatcgagatgccaaagtataatgcggacggtgatgtcatcgacattacattgaatacggtaaaggttatgaattttgataaaacgattacgatgattccaagctacgccctcatttcggattcgttccgtaactggagaggcatgcaggtgtccggtggcagaaggattaagcggagtatctatattgatatcagcagtatccgtttttgtacggaagagatggtggctgaatttgagaaaattcactacctgactgattatgtcacggcaaagttgaaggaaattcaagcatacaatatggagcacgaggtgaataccgaaagcaacgtgaacggcagacaactgacaaatgtcggtgtattccgggaatatatccatcaatatttgaggaatcatccaaaaatcaataaagatatgacgatgattgtgcgacaattagcaccggaagatcgcgggctgcctctggaaatctatgcattcagcaatgatattaactggggtgtatatgagaacgttcaggcggatatctttgaccatattttcgcggtggcgtcaacatttggactacgggccttccagaatccaaccggacatgacattgtgcaactgaaagaggataagcaatatgcgcgagagtactaagaagatttattaaaatagatgtgacggccaccatattggtggtcgtttttacgtttggatgccctccatttcggccacgggtgaggatatgtggagtcttaacaagttggctaattttaaaatcacaggaacacatccaagtgctttatttatgagactgacggtcagttcatgggatagggttcagtgcaagataacaaaacagaatgtctgcaaaaacaagtagacaatatgtatttctttacattataatctaattaattccatattttgaaaggggtgatttggagctttttctgatcaggcgtgtctatgaacgagggaaaagcatgaagtctctttggcgtgttaacttttcaaaagaaatggagggagaatgaaatgaagaaaacattgtattctgctattatgataacgcttttatcaggatcgattgtgggtacggccttggcggataattacgagtcgaatgacactttgagcagcgcgtataaaatcccaacgcaaacggtggccactccctacggtccggcttactggggtggaagtgcttggtcttatctatcatccccgacagatgtagactactttacattcagagggcatggcaaatctgtcgtgctgggttctccttccggctatgattacgatctgtacgcctatgacagcgctggaaatttggttgcttcttctacgaatacgtcaggagcggatacagttcttgtcgaatacaataatgtatattttaaagtgataagcaaagatggacgatacagcgataccgatgcttacagcgtaaccttttataaaagggatgtctgggtgccgtgaccagctcgtgagagtaaaataacgttaggtatcgtagactttaatgcttccgtctcatgaataggaactctaccgcctcaatgaggtagtagagttttatttattcaagccaatgctctggaagaatgggttaccatagcccccacttgagtgcattggaaaatttaatggaggtgagtgccgtggcacgtgtattagttgtgatgatccctgcagaaggccatatcaatccgtcgcttggattaatcaaggaactggtagagaacggtgatgaagtggtctactgttgtaccgaaaaataccggacgaagattgaagcgataggcgcacaatttaaagcctactccttcaacgaggcaaccctgctcaacaaccctggtatgaagccatttgaactcaagcatccttaccaatttttatatatgatattggaaaaagttattcaaaggtttattccagatgttctgaatctgatcgaacatgaaacctatgactatatcatttttgactccataataggctggggaggacaaattctaggtgagaagttaggtataccaacggtatgctcaaccagcacctttgtttttgtggagcctcttggatcagacaatcaactgaatgatgatacggaggaggtcaaggagctatataacagcatcgtggaagtgtcccagcaaatagcttcccagttcgatgtggctgtaccttccctggcggaacttttagggcattcaggacaactgaagattgtctatacaagtcgttattttcaacccatgggggacaagctggacgacagctttgtgttcactggcccatctattatcccccgcaaggatgcgccaggctttgcaaaggagtcactgtatgctctttacaaacaggcagtttatatttcgatgggcaccattttaaataaggatcttgatttttataagctttgcttcacggcctttcgtgatttgcctgtgcagtttatcttgtcttctgggaaggataccgatatagagcctattgctgatctcattcctgataatttcatcataagaccctatgtccctcaactggaagtgttgcagtgtgtagatgcttttctaacacatgcaggaatgaacagtaccagcgaagctttgtattacaatgtaccattaatcatgcttccgttaacatcggatcagccgcgtgtagcaggccgggtacaggagttgggagcaggggtcatcgtggacaaaaataaccttacacccgatgttcttagaaacgcagtcttagaagtgctccgtaatgcctcctacaaggagcatgctgaggttattgggaaaacgttacgcgatgctggcgggtataagcaggccgctatggctattaagaactttataggcaatcagtcgttatcggccacgcccatctcttcgtttgaatgaaaaggagaccgttcttcatgagagctagaagaggaagccgtcacccgactaaaatggagtggtggcttccaattgattcaagtgcgtatggaggggtagataaacggagaggggcattatttttaccatattgttcgtataccttttgcaaaggagagtcttcagatgaatcatcgaattccggaatatacattgaacgatggcttgaaagtgcctgcaattggatttggtacctatagtttaaaaggtgaagaaggcgttaaatcgatcgcgtccgcaatggatgcgggttatcgattaattgatacggcgtataactatgagaatgaggcaacggtgggcagagcaatcaaacaaagctccatcgccagagaagaactactcatttcctcgaagctgccggggcgttatcacgctcatgataaagcacttgtggcgatccaggaatccctgtacagagcggatctggattattacgacctgtatctaattcactggcccaatccgaagaaggacatgtatgtcgaggcatggcaagcactgatcgaagccaaaaaacgtggatatatccgatccattggagtcagcaacttcctgcctgagcacaatgatcggctgattaaggaaacggggatagcgccgagtctgagtcagattgagctgcatccgttctttgaccaagccgatcagcgggaacaggataaaaagcatggcatcgtgaacgaatcctggagtccgattggacgtggcaatgatgccgtacaggatattctgaaggatgagaacattcttcggattgcggaaacgcatggcaaaacgccaacccagatcattctgcgctggcatgttcagctgggttccattcccattccgaaagccggctccttgcagcatcaacaggaaaatatcgatatattcgattttgagttgagcacagaagagatacaggtcatctctgcatttaatcgtccggatggacggttgtgggacaggacccaagcgagtacgaagaattttaaagaacgacaaatgaagggctgctcccatgtcagatatgacaggaggcagccctttattgctttattgttgaagcatattaagcaatgttgcagtttttcatgttgcgtaatttctgtttactgttcagcagggatacggaaggtcagaatctcatacggtttgatatcaaaagaaattcgaccattttccacggcgcattccgcttcgttattctcgagcaaatcacacgcgtacgccgtaacacctgctccctcaggcaattgcagggaagcacggctgcggcggccatgtgcttcgtagactcggatgatcatatcatcgttgttctcggcttttttgataacctccagcacgacattatcctgatcgaccgatgcaattgaccatgttcccggcaacgtaccggtttgcggacttacttcacgggcaaccagcggacggttgagatcataagcagcttggatgacacgtccttcacggaagtcgccctgatgcggatagagcgcgtaggtgaatacgtgctgctctttgtcggcattttcattcgggtacgttgcgctcttgatcagcgacagtcgcatcaccgagttatgaatatcatatccgtatttgcagtcgttcagcagagcagcaccgtacccgttctccgccagatcggcccacttctgcccgcatacttcaaaccgggcttgatcccagctcgtattacggtgggtagcacgctcaacgttgccgtactggatttcgtagacggccttttcactccagatatccagcgggaaagcggctttcagcagcaaatgctcctgcttccaatccacaaacgtacggaaatcaatccggcgcgtgtgcgcatagaagatgatcgtctgctcaatgaccgagtccaggaactgtcgcttcacttgaagcacggaacgcacgggcccgctttcaacccactccagcgactgcaggtcattaatctcccacatatgctgttcataataatcgtcaatgttccatgcctcgtattccgcaggtcgatcctcgaacacttgcagcacgttaccacgcttgccagactgaagcagctcgcggccctccagcttgtcccatacggatgtgaactcggcactttcattcaggtgaatatcgtaccaaggtgtatggatatggcgccgatctgcttcccactgtgcaaccgaaactcccgcaacaagctcgcctgtcagatctggtgtgattcggaaggatttatacccggatgcaggcacgttttctgcaaggaatacaagtccaccttcgggagtccgctggcttggtacagggcgatctccatcatagacggttacttttctcgcaaaagcaggcagttcaaccacatccgtccgtacaaatccggtcgtgttgaatactacaatggcttcgccatcagatgtaatttggcttgcaatgccgttcagcgcactgtctttcagctcatccgtgacacgcagcacttcttcatattgctccttggaatccacatatacctgctcaatggagctgcccgggagaatatcatggaactggttcagcatcgtcagcttccatgcatgctccagtgcatcggttggataggccgcctgtgcattcgcctgacgatgaatcatggcatacagctcggcatcggccagcgcaaattcactatgacggttgtaccgtttgttacgcgccatggaagtataggtaccccggtgatactccagatacagctcacccgaccagcgaggaacggaaggaacatcagccagattttgctccagcttctcgaaaaactcgcgtacaaaggtacgtttcaccgtgggtacacccggcaatccaatatcaagtcgtctgccatgctccagcatctcttcggttggtccaccgccgccatctccgaatccgaaacattgcaggacatctgcattgatgtttttgttctggtatcgttgccacgtgcctttcacttgcgaagcattaaaccgaccattataggtcgtttcgaagcgacgctgcctgaaatcagggtgtttgtcatagtctgttgctgtgataaagtgggtcaggacctctgatccgtcgattcctttccagtacatcgtatcgtttggaatctggtttgtatcattccaggcaattttggttgtcataaaataatcaatgccgctcttgcgcataatctgcggcatcgctgcactataaccaaatacatccggcagccagagcacacggttctccacgccgaactcttccttgaagaaacgtttgccgtagataatctgacggatcatggattcacccgagatcaaattacaatcagcctccagccacattgaaccttccgcttcccagcggccttcggccaccttttccttaattttctcatatagggatgggtagtctgctttcaagtacgcatacagctggggctgagaggacatgaaggtatactccgggaacttgtccatcaagtagagtacactcgcaaagctacgaatgaccttctcccgagtctgatccagcgtccacagccatgccacatcgatatgcgtgtgtccgatacagtgcacggtagggatgtgatcaccggcagggcggatatcaccatagacatgatcttgcagatatcggcgcgcttccagtaccgacgcatggaattctgcgctgttttcctggcgcaaatccagcaaattcacggctttattcagatgttcgaccaacttcaggcgctccagatcatcctcacgcagcagatccgcagcatccagcgcagccttgagatcgtaatacaaatcggagacttgctgatgatgctcggcgatatatacatttagaaaaacatctgcggcagacgtactgcaatatgcatataatgccaactcaaactcttcgcccttcaccgcggatggagtcaagtcaatctccgtatggttaacatccagaccgcagattaattccccattgaggaatgccagaaattgcggattatcgtaattccagatatcatcagcaccagtaacgatggcacaaacgaccttttttccttccatttgatccgggatttgaatgcgggttttgaagcagctgtgtacgtctttgccaccccagccatcacccttacggaatacgttccaggaggaagggtcctcatgcaccagttcccaggagtggtaaccactttctttatgataaagctcagggatatatgtctttgaggtaagtcgagcacgttccaagtgtttaacaatggtatggattcgagtatataaggaattcattttcatgttggtttcccaccttggtttgtagtaagtacaggctgtagtcgttgttggggcgaaaatactgcaagcgctaacatatcaactctatcataacaaaagagaaatgggcgaaactacgtattgtatgctgaaaataacgtctttttattgcatttcatgctaaaataaaatcattagaatcaggatagggggcatgtccatgacaccatcggttttggcatacgagcaaggatatgcgatccatgtgaaccagcctggagattcacttttttatcatctggattatgacgagcgctcccatgaactgaatatggaatttcagcatttccatgatttctatgaaatctgtattcttctggatcgaacagctgcgcacatcattgaaggcagtttatatgagatccagcctctggatatcgttctgctgcggccttcattgctgcataaaacgcaatatccgaagggtgccccgccgaaacgattgatgatcacctttgccatgccacgtaatacacctggtcttgagagcggttacacagagctgttttcgatttttaataaaccggtcccgatattccgatttacagaagaaagacgcaaggaagtcctcgcgccgatcaatgatatttttgctatatcgcagcagtcttctgtccttcaatcggttatgattcatagcaagttcgtggagtttctctgtgctcttcatcgttactcaccagagaacgggtatgtgcgtgaagagactggatcaacgatgtccaggcgcatgtatgccattgcctcttatattcacagccattatcagcaggatttatctttggacgaggtatccaagcgtttttatgtaagtgcccatcacttgtctcgccaattcaataaggttaccggcttcaccttcacggagtatgtgcagatgacccgtattcggaatgcccagcaaatgctgctgaattcgagtgagaaaatcacagatattgctgcacagtgtgggttcacaagcttttcccagttcaatcgcatcttcaacaaacagaacggaatgtcaccaagtgcatatcgccgaagcagacattcgcagagcgagcgtgaagttatgcttgtgggtgagagacccgaaccacttgggagcctagagtgagagggacgaggagagtgatggacagacctataatctacttaacatgttactcttttctgaatagaagctttttataaaagaaggaatagagaagagaaatggtatattgtttggtccatatatttacgattcagctagggacaaaccgccatcatacatccgatatactttgtcacaatattcatgcatacgctcatcatgggtaaccataatggccgccttttggcgtgatttcacttcttgcgcgattagactaaccacttcatgggctcgtttggtatccaaactggcggttggttcatcggctaagatgatgttgggattattcattaaagaacgagcaatggctgtccgttgtttctcaccaccggataactcttcggggaaactttttaacttcaaacccagccccagttcttccagcagcttggtggcaaatgccttatcctcttttttaatcgtccccgccatcctttttacaactagcagttgatccagaacatttagatagggaactagatttgaagattgcataataaatccaacttcttgcagccttatattagataactctttctccgtaagcttcgaaatatgatttccgtttagttgaatatctccttcggaggctttcagcatggccccagcaatagataagaatgtacttttaccagaaccagaaggtccaactacagcaacaaactcccccggttccacggatatggatacatgatcaagcgcggtgatccgattgtttccttcggcataatacatggtgacttcccgcatgtgcagtcccttactcattattcaaccctcccgagcgccttaagcggatcaatcttagtaattttgcgaacagataccagtgaacttaacatagcaataaccagcaagataatagaataattgaagacaagactggtttccagcttaaatggcattccttttggcataattgctgctgtcccataagttagcaagattccaacaacaatactagtcagcgaaagtacaaacacttgcgagataatggcttttcccaagaaacggttactagcgcctatcgctttcataatgccaaactggttggttttttgcatcgtaatgacatagaagaataccccgagtacaaatgcagagatcgcgagtagaaatgcaagcatcattagaatcgtaccgttctcttctttgtatcctggcattccttgtacagctgctgctcgggtaactgtatctgtgctggataactctttatttatagcttctggatcaatattctcgccttgtaacatgatcgcattaaccggtccggcaattcctttatctgaacttggagccgcgaaggcaatcttccgccattcagccattggggtaaatacggatgcaacgtggttatacgtctgattctccacatatccgataattgtcaatgattccgtcgtgccatccagttgaaacgtgtccccaagttgatagccctcatctttcatggttgaattcaccacgacacccgtagggttctcggaagacaggctttcaccttctacaatagctggttccaaaaagcttcctgggtcaattcctataatcgctatatctaccttatcttcattcttggtgctattctctttcagtgccgttgccatcgtacttcccatgggtgatgcagcatccacattaggaagttgttccgccttcgccaccagttgatctgacagcagtgacttgctcatggaagactgagctccttcttcaaagatgacataatcagccttcatggtcttgaatgttgatgcggctagcgtagataatccgtttcccagaccggataaaataaataccaaccaagccattagtacgaagataatgataatcatcaaaaacttcattttattatgcattaactccttcatcgctaaaaacatgatctgttcaactccttctttcatttttattgacacatgtgtcaaattagaggtacagccacgtggtttatataattaaacgatataaatgacacttgtgtcaaattaaagccaagaataaagttagctcttggctcctccgatccacatttggaacagcaactttccccaatcaggcgtagggatatttagcatattaggcgtattaattaagttaaaaaaaacaccaataagtacaggtagaggaatatcttgtcgcagggcttgatcctgctgagcgcgttcaaacaagcgtgataattgaatttttagggtcctatgtgcttcctcaataaattcaagatctctcgctgccgcagcagaattagttgtattaattttactggcatctcccagaagttgatggagcgtagattcttctgcgtagatcagaagcagttgctcaagagcatccattggatcagtctcatcaatggctaatgaattctctaatacggttgcaattgatcgcttcatacaagcagcgacgatctcttctttattcgcgtaatattgatatatcgtgctccgggctccggacagatgctgtgagagcagcttgagatgaaaaccgtcatagccatgctcaagtactaattttttagttgtgtccagtagctctgtttcagtaaaagattgttttcgtcccattaaatctcttcctttttatcattttaagtcggtgtgaacttcacgtaatcgatgtgtactgcaggtctacaggagttcttcactttacttgcttattatgatcagtttagcatatgtttgatggccataataccaaccaagactattggtctgaataaatgggtggacgatatacaaaaaggcaaacccttgaacttacagagggtttgcctttttccttctatttattgaataccgaatatataccgatacgaatacaattgatcttacgatcagactcacgcatgtaccgaatgaatcttgatgttatccctgatccttcggcgccagctcaatagcagagcggatggcagccagcatacttttatcatcggcaatatttttgccggcgatatcgaaggctgtaccatggtcaacggatgtacggatgatgccacctttcaggccaacggtgatgttcacaccttcctcaatgcccatcaccttgatcggtgcatgaccttggtcgtggtagcaggctacaacgatatcgaagtcaccgcgaccagcgcggaagaagagtgtgtccgccgggagtggaccaacgacgttaatgccttcctgctgcgcacgatcaatgcctggctgaagtttctcttcttcttctccattaccgaacaagccgttctctccggcatgaggattgattccgcatacggcaacgcgcggattctcaaagcctgcttttttcaacgtatcatgagcaagcttcaccacggtgtaggttctttccgggttaatactcgcaatggcatcgatcagacccatgtgtgttgtcaggtgaataacgcgcagattaggcgtggtcagcatcatcgagaagtcctgcgtatccgtcaggtcagccagaatctcggtgtgccccggatacaggtgccccccttgatggagagcttctttgttcaaaggtgcagtgcagatggagtgaatctgctgttttttggcaagatcaatggctttggcgagaaactggaatgctgcatctccagccacggcagatactttaccatattctagatccgcaggaacgaggttcagatcaatcacatccacagtaccgaattcatacttggcttcggaaggctcttgaatcgcgttaacgttcagacttgagccgatgactggcaacacacgctccagaatctttgcatcaccgataacgagtggattgcactgatcgtacatttcttgatgacccagtgctttcataataatctccggtccaatacctgctgcgtcgcccatcgtaattccaattgtaggtttcatacaagaatacccccttttaatttttgaatcgcatggataaagacatccggtttgccgaatccgcctgctttggtaatcacatgcagatcatcaatcccgataaacttggagatcggcacgccgatttcaagctcatccagcagctcgaagccgctaatattccatttcagacagatttgttttgccgtatcaccgccggtcatggatacccctttgaaaagtccctcttccagcagtctggcacagatctcacccatcgcaagtacaatctcgttgctgacttccgtgtgattgagaccacgaatttcgcccgttgctcgtgccagttcgatatccacctgttcagcggtggagtagaggacaacatcttgtccttccagcgctttgtctcgaacctcgttatagacacgttccatctcttccgcgcggtctgcggttgcggataccgctttgaaggaatggaaggagactgaagctacgcgggacttgcgcatcaagcgatgcagctgctctcgggagtttttgttcacgctgccgaccaccgttaggattggaccgggattctccgggatatcaagtgacgcagccctggattccaactcgtaatgtgcggggaggtaattggcaatgcccgccgaacctgcccaagtaaaggtatactccaactcacgagtcatctgcagaatcagttccagatgtctttcttcggtggagtccaccattacatacgggatattctttgttttcaactgctctagcttggtgcgaatatgattctgcccggcttccagatcagcgacggtgatctcgccaacttcgtacttggtctgttgtttcaacaagtccggaaggtaggaaatcgttacaggtgtcttcggatcatgggcaatttcagtatctgccagcggaacgccgttcaggtaatggattccttccaatatcgtccggttattttttggataacccggggcaatcatcataaagtccggctttacgacatcatatacagcatcaatctcgatgccgatattaccacgcatggtggagtccatttttttgaaaatcgtctcaaatccgttgttcgtcagcaattcagcagcccgatatacacggtcatacgcttcctgcgaggatatggaacgactatctgtatcaaagacgacggcatcgtaacgtgtaagagggccttcatctatattaaaaagaacactggtctttaagccgtgacgggcaagctgcaccccgctgtcattggcaccggtcaaatcatctgcaataatggctaatttcatgcagtcatccctccttgtaagcacaatttaataaaaagtccgttcagatcatccattaagcacagattaagcaaattaaatcaggtgatacccatttatgtggttggtcgttgattgtatttctcgactccgcctgatttctccaatcgtttggagaggaacccgatgaagatcggcaacaggatggccgttgttacaacgctcgctgcaatttgtaccgtagcaatctcggcaattgggccaaatgaagcattagcagccacgatggcagcaggtgtacctacggcattcccggctgttgaaccttcggaagcacccacgatggggttccagccgatggctttaaagagcaggaaaccgattccgcccgttaataacacggttaacacacccagtaaaattccgctaagaccaccttgaatgatggaggagaagctaatattcatacccagagcaaatgcaaagaacggaacaagtttgtcactgcctttatgcagccattcccccagattgcggtccagattaccaataatgacaccaacgatgagcggaagcaataccgcaacaaaggccataggggaaaacataccgttcgcaaaacccatcgcaccaaagacggagagcgctaccatggtcaggaaaggaccatcactgagtgccaggaaagggtaggctgctttgtcatcttctttgccgtattggccggcgagagcaatgtacaaaccgccgttggagttagtcatcgcagcaataatggcaagcggggccagaccgagaaataacccgtttgaatccgcgaacaaaatagcgataaaaccaagggctgcaccaatcacccatttgaacgtaagcaaggtcaaacctttgccgacagaggaacctgctgttttaaacgtaatctgtgtacccgcaatgaacaggaacagggcaatcaaagtactggcactgttaacaaaaagtgcttccgtgaatccgccaatgcgcagggcattcgggaagaatgtattgatggttgcaccaagtaacaggggaacgaccatcataccgccagggatgcgatctaaagttgctttaatgttcatagtagtagctccttatgaagtaatcgtttttatgaagcgcttgcagggattatattatcccatatcgtttaatatagcaacaataaattattgtaaattttaaatacatacgtaactgtttaaagatgcaacacataaaagcaataaaaaagacgcaaacttaaagttaatctttaagtttacgccataatgtggcccggttaatccccagacgctctgcagccttcgattgattgttattttcctcctgaagcacgatctgaataacttccttctcaatctccttcagcgtaccgttcaacttcattgggcttgaagaaggttgctgatccagcaagcgggacaaggtagccgtggtgattacataatcttgttcgttgagtgcagcctgcttgatcaagtgtttcagctggttgacgttcatatgtgtgatctgatcttggatcagctgtagagcatcttctttgattctcaccgcagtagttccgtatttgtggtagtaatccgtcaggaaatgctgcatcagtggagccagatcctctggtctatccgcaagatttggcatcatgattgtattaagctccagatcaagtgaccactgcgggttcaatatctgttccccgagtataaacaccccaatctgattttgaaggcaactctggataaaggcgagcaactccggatcttccatacgtgtttccatgtggttaatctctacatttctaaccttggcgagtggtatcttgtgcaaatgaccgggcggaacttgcgagagatccatctgtaataagagtccgccaccggagtacatctgatgaatatgtttgaccagaaaagatttaccggaatctgcttcaccccgcagatagatgggttcatgattctcgtagagtgcccgaatgttctgtaataccgcctgcatggcaggggattcggcaacgataggctccatcgatgcgtccgtaaacgttgttatgccgaattgtgcaaaggcatagggttgtcctttttccagcatatataccttgtagttcttgttgtccagggtcgtttcataggcgttaaccgtgagctggtaatcgtccaccatgaacacattctggatctgggattgatggaactccagactggtattggtcagatatatgtgattatcggtcagcggatttttcccaaaatcggtcagattctcaaatacaacttcattccgttcatttaaaataagtaaattgggatgttcccgtgtaaccaggtcattcaggatgatcgatatcgcatgatttttgctcaaataacggtagaccagctgtgcatcctccatcgctctaaggatggattcctgtccagattggattaacaatccctccagaccataggtcttcgcggtgttgacggtgatcacatctccgacaatctgtcggtacccggaagctttcaactccaagagtaatcgggcgacatcttccgagctatgtatggtatagaccttgaggggcagatccatcagatcaataatcgattgtgcaccagaggtgatgttggagaagccaacaatggctgtttggccgttaaactggcttgccagtgtaagtgaacgaatcatatcatagcccgataactgcacatcaatgacgggaatggttactgcttttttaatgagttgggcggttccgccgcggctgatgataatctctgcaccatttttctcagcttgagttgctaattccacaccgtttgccaagtcgcccacgtccgtctgaatggttaactggggaaaacgaggaatgcactcttgtataataggaatcatcgattcgtagggagcaataaagtgaactcgtgtacgcataattttcctgcctttatagaaaactttgatccccttattatagccaacttgcgaaggaatggcacctatgggggaagcagccctgttgtgtctgcaaaatgcccgtgtgatatgcatccataactctccgagtgtaatgtgatgaagtgcactgaatcgaatcgttatctatttcaaaattaatgcataattgcacatgataagtatagagaaatgaggagattacatatgggagagatcataaagtagctgagccggatcacatcattaaggatgttgtcgggaagttcccgtgcagggtgctgtggagtgagggccgtccatgtctggagtatcagagggaagaggatgtggcgttaataaccgaatacgtccataaaacgtataacgttgaattattggatgtgtttttcacagcggtggagagccttccggtggagccatagatttaggtagggatttattagagcgcgatgagaaaaggattaaatctcatataacttccaatgtacatgataaaataaataagagtgtacatcatgttggaggggaaccaatgagaattgtgttgaagagattggggtatgttgccttggcaatattgggtgtcatgctattgttcattgtaattagtttcacgaatcatacgattaagctcaagagtgagttgagtattctgtcgccgccaggtgcaatggttaacgtgaataatcaccaaatgcatgtctatacagaaggttctgggtcacaaacactggtctttctgtcaggtgggggtacatccgctcctgtattggatttcaaggcactttactccagattgtctgaacaatacaaaattgctgtagttgagaaggcagggtatggcttcagtgaaacggccaaggtgtcccgcgatattgatactatattggaagaaaccagaacagcgctgactttagctggccagaatccaccgtatgtgttgtttccgcattccatgtcaggcattgaagcattatattgggcacaacggtatccaaccgaagttaaggcgattattggattggaccctgctattccagaggtatatgaagcatatcctttgccctcgggaggcatgatgagtctgacgggtttgggagcacgaatggggattacacgctttttccccgggattgtggattcatccgctgcgattaaggagaatcacctatctcctcaggaagaggaactttaccgggcgctattctacaagaatacgcagacatcgaatatgaatgatgaagtcaacatgattaaacagaatgcagcaaaagttgctacacagggaattccggatgtgccgatgtattttttcatatctaatggagaagagttacccgttgagaattggaaaacgtacctaataagttatatcgagtctgtgaagatgggacaatatcagattttagatggcggtcattacatacataatacggatccagatcggattgcagaggaaagtgtgctgttcattaaaggactgtgaactaggaagaaagatactgagaattaggagaggatttttggattataaggcgacactataggtgttcgtcttttcttttattactccatcattaacttactttggatcgtagtaactccacttgccatcgtgaaatgtgaaacgtatgtgggcgtattcatgtattatagtatacatatgcacttttcggaggaggaacaagtaatgggaatcttatcgaggtttagagacgtgatgaaggccaatgtgaaccacatgttgtctcgggcggaagacccggagaaaagtgtgaatgaatatatgcgcagcctgagcagtgatctgggtcaggtgaaggctgaaacggcagcggtgctgtcggatgagagccgggcgaagcgagcattggatgagtgcagcgccgaggtcaacaagttacagcggtatgcggaaaaatcggcggagtcgggagacgaagacaaggcacgtggttttctggagaagaaagtgaagttggctgacaaattgaacgaattacaggctgcctatgaacgtgcttcagccaaagccaagatgatgaaacatatgaatgataaactcgttgcagatctggggaaattggaggcgcggcatgcagaactgaaaggtcgcatggcagatgcaaaggcgcagcaacaggtcaacgaacggaatgcatctgcgggcagagctgatgctacattgaaggccatggaagacaaggcgaaccaggcgctgaacgaagcagaggctttggcagaacttcgtgctggggcacaggaagatgatttggacgaattaattgcccagttggagagggacatgaacgcagatgcgggtaataatgagagtgcgtcgccaagtgcggaggaagaactcgcagcaattcaggaaaagctgaagaataagtagtacgttacaccatttcgttaacattgaggtgagcagatgccggttattgaatataaatgtccaaactgcggcagtggcatgatctttgacagtgtgtcaggtgcattatcctgtcccagctgcggccgccaggacaacatagagcagatccccgatcccttgaaaagacaagtattcaccgaaaatgaggtcaaggaataccactgtaacagctgcggagctgacattgtgacagaaccggagactagtgcgacgacatgcagtttctgcggtgcagcggttgtactcagtgatcggctgacgggcaatttggcccccgcgatggtgatacccttttcgatcaacaaggatcaagccaagcaggctttcaaaaagtggtgcaaaaacggcctgttaacgccaagtggcttcatgtccgccgatcggattcagagcattaccggcatgtacgtgccgttctggttgtatgagttacataacaaaatcgaagtgcatggtcgtggcaccaaggtcagatcctacacccagggcgactaccattacacggaaacacagcattttgatatataccgccgaattcggctgaattacgtgaacctgcccattgatgcatcggagaaaatgaaagatgaactgatggataagcttgagccttttccatataatcagctgaaattgttcaagaccccgtatctggcggggtacattgcggaaaaatacagttatacggacgaggaactttttccacgggccaaggataaaacgagatcgtacattgattcttatattgcctcaactgtatccggatataccagcgtgagctacacggacaaacagattgatactacgctcaaaaatgcggactatgtgctgctcccagtgtggatggtcaactatgactacaatcgggcacagtatacctttgccatgaatggtcagacaggtaaagtggtcggtaaaccaccgatcagcaaagccaaagtggctggatggttcgcaggggtatctgcggtctcgttactgtcactgaagctggtttcctggatgatgggaggtggattcttatgagaaaaagaacccctctggccgtgatggctacgctcattttacttatgatcacccttgttgctccgttgattcccatgtcatcggcatccgcagcggagagcaaaaatctcatctacgatgtggccaacctgctgagtgagcaggagataagtgaattgaatctacttgcgaatcagtatggcgcggaacgacagacggactttgttattttgacaacaaataatgttgagaatcaggatgttatgctcttaacagaagatttttatgatgagcagggattaggttacgataagaaatttggtaatgctgtcatattgacgatggatatgaataatcgtgaagtgtatctggctgggttttataaggcaaaagagtatctggacgatcagcggcttgatgctatccgtacccgaattacctctgaattgtccaatggagattataaactcgcatttgagaaatatattgagctctcttacaaatatatggggtatgaacctggggtgaatccaaacaatattttgttcaacggttggtttcagttgggagtatctgtagttcttggcggtattgttgttggtattatgacctatcgttccgggggacgtgtcacggtcaatcgtgcgacttatgaggattcaagcaattctagtgtaattgatcgtcaggatcgctacatccgtacaactgtaaccaagcgcaagatcgagaagaacaataacaacgggggtggaggaggaggcggggggacctcccgaggcggtcattcacacagtggaagtagaggttcgttttagtaactgagtatgcggattacgttaaatagaagggatgggaacgagtatgggatttttcagaaatcagttttcgaatgtggtggaatgggaagagttcagagatgacatgatattttggaagtggagcaaccgggagatcaagaaggggagtaaacttataatccgttccggtcaggacgccattttcctgaataacggtaaagtggaaggcattttcgaggacgaaggatcgttcaatattgattccgagatcattccgtttctttctaccttaaaaggattcaaatttggattcaacagcggcatgcgggtcgaagtcttgtttgtaaatacaaaagagttcaccgtgcgctggggcacgcaaagtccggtgttgattccaacaccacaactcccgggcgggatgccgattcgggccaacggtacatttaattttaaagtaagtgactatgtcaccctgattgataagattgcaggcatcaagcagagttatctggtggaggatgtcaaaatccgaatcacttccgtgctggatcagcttttaatgaagtggattagccgcgaaggtaaggatatgtttaacctgcaggccaatgcatcggatattgccaaaggtattcaggaagatctggatatgcagatgatggatatcggcattgggattaccggtttccaggtgatgagcttcaattatccaaaagagattcaggatatgattacaaagaccgcttcgcatgagatgattggtaatctgcaaaagtatcaacaggtcagcatgacagacggcatctcatccggtaaagtacagggcggcggcgcggcctcagatatggctggcatgatgatgggtatgaacatggccaatgaaatgatgaaaaacatgaaccagaatcaaggccaaaaccagaacaataattccaattcgtctcagaatcaaaataacgaccagaaaccagcgggaaatagcaacggtgattcaaatacatcttcatctacagaaggcaacaagaagccaaacttctgcccgaactgtggagccaaaaatgaaggagccaacttctgtccgaattgtggtcaaaagctgggctaatcaaataaatacatgaagggcgaggttcgtagtaagtgaaattactgcggagctagccctttttaatttttataaaagagttgacaactgctcacaaatcatttatctttaacttaagatatttaatttaaatataaatagcaaccaaaacaaatatctttaatccattacacaaggagagatcaagatgattatcccaacattgaccagaataaatgaactttcaagaaaagccaaagagggcggattgacggagatggagaaagatgaacaggttcgtcttcgccaggaatatctgcaaacttttcgcggttcggtcaacgacattctgctgaatgcaaccatctatgatccaaacggcgatgacgtgactcctgataaattgaaacaagaacaggccaatcaaaataacaactaggatacaattcgctagatcatatatcttaatttaaagataatacaaacttactataaatcacttaccaaaccaaggaggaattaatcatgactattcaaacagcaggtattcaccatattacagctttcgcaggagatccacaggctaacgtagatttttatgccggagttctgggacttcgtctggtgaaaaaaacaatcaacttcgatgcacctgatgtatatcatctgtattttggcgatgagcatggaagcccaggtaccatcattaccttcttcccatccgctggatcaccacgggggaaaattggtggaggtcaggtcggcatcacttcctatgtcattcctcctgggtcgattggcttctggcagaatcggctggaacagtataacattgaggtaaccaaaacaagtcgcttcaatgaagacctgcttcaattcgaagatggcgaaggcctgcggcttgagcttgttgaacgggaagagggagcaaccagcacttgggcgcacgagggcattccaacagataaagcaatcaaaggcttcggtggtgctgtcctgttcagtgttaatccgcaaagaacgatggatgctcttgagaaaattatgggatttgtcagagtgagtaaaaatgaagagtatgctcgtttccggtccagcggggatatcggtaatgtcgtagatgttccagtgacccgtatggctctgggtatgggtggcgcaggtaccgtgcaccatattgcatggcgcgccaaagacgatgaggagcatgcacagtggagcgaagctgtacgtgattacgggtaccaaccgactccagtgcgggatcgtcagtactttaacgcaatctacttcagagaagctggcggcattctgtttgaaattgctacagatcctccgggctttgccaaagatgaacctgctgattcgcttggacaaaaattgatgctgcctgaatggtttgagaaataccgccctcaaattgaggacaatctgcaaccgattgtggtaagaacgctcgtacctgctacagctgcgaattaataagagttctagaaaaaacctgaaaaagcgaagcgttcgcctaaaagctttctgaaagaaagctacatcggaagtatacgctatccccggattttcccttaggaaaagggaattgaaaaatctggggataacagcgattggagggttattcggtcatcgaagtgtatgtgtaaatgaaaaaccaaaggagcaacgaaggatgatggagaaaaaggttacctggctggagctgttttacgatctgctctttgtagcagcggtcgccaaagcgggccatgtcttgttacatgccgaacatggagtaattacgtttgaatatttaatgaagtttgtgcttatttttatccctgtttggtgggcatgggtcggtcagaccttgtttattaaccgttatggtcaagacatcctgatccatcgaatattcctcatccttcagcttctgtccgttatggtcatgacggcgagtctttctacccattttgaccaatactacttgtccttcttcataggatatatcggctcgcgggcatttacggcgattcagtatctgacggctcacaagtcaaaaggcgagcatcagcagcgagcggcccgttatttgggtatctgtttcctcattggcatattgatctcatcaggttcattgttcttcgattcctggctgcgttacgtgattttgtatgcggggattgccgttgacatcgtacttccgttgattggacgcaaaaatctggtgaaagtaccggttcagacccatcatttgttggaacgtttcgcgctctttacacttatcctgctgggtgaatcggtggtaagcattatcgctgtgctgcaagccgatcattgggatatgaaatccattctgttcgccgcctttacgtccatctttgtcattgcgatatggtggcaatacttcgacaacgtggagaaaaaagtcagcaaagagattcagactgccgggcaagcgatcatatacggccatttgttcatctacatctccatgagtatgatcgctgcctcaattcagctgttatatcagaatcagttaaactatgtgttcatgctagggtttgtgtttggatcaacgctgctatatttcttgtcgacctcacttgtgttccaccgttacagacacgcacatctacgactccggccatttcatctggcagtgatggtagggttgctggtggcatttgtccttgttgacctgatctatcgggttccgggttatgtcatcatgggcgaagagatgttattcttcctggtgtatgcgaaacttacgacttgatataagtaaaataaaatgaagaaaagtcacggacaacaggtgtccgtggctttttattatgccgctaatcctggacattttttaataatataaataaagcacaaatctaatttaatttcttctatagaatctgttaatatgagactaggtacaagtgaatctaccagatcatagaatatcttttatataaaatgagtgtacgttttgttatataaattgaactaaacatttacacgaaacggagaggacagaaaaaacctgaagaagcgaaagcgttcgcctttatccccggattttccccatataagggggattcataaaatctggggataacagcgatcggaaggttattctgtcatcggagtgtccagtgtaaatattctttagttcaatttatatagttcattttatatatagcgattcgttggtatggggatgacaatcaggagggaaatcattgagcacacatcaaatcggagttccattggaagggtttgcagagtttagtcgtacggttgccgctgaaggagccgttttactcagaaatgaaggacaagtgcttccacttcgtgaaaacgaaaacgtttcagtttttggacggattcaagtcaattattatcgcagcggcacaggttcaggcggtagtgtacatgtggcttatacaacgaatctattggatggtctgcgcagcaaaaagaatataacggtcaatgaagagctggcagctgtctatgagaagtggattgaggaaaatccatttgatgatggcggaaaagtatgggcggccgagccatggaatcagaaagaaatgcctttgacggatgaactggttgcacaggctagaagcaaatccagcaaagccattatcgtgattggacgtacagcaggagaagaccaggataatgcggatgcgccaggaagttaccaactgacagaagatgagaaagcgatgttaaagcaagttacttcgcaatttgaacacacaatcgttgtgttgaatgtctcaaatatcatcgacatgagctggttaaacgaaacgtatctacatccgatccaaggcgtaatttactcctggcatggcggtatggagggtggtaatgcgattgccgatgtgctggcgggggacgttacaccaagcggtaaactgacagatacgattgcttattccattgaagattacccttcgacaagcaactacggcaatgagttcaagaacctgtatcaggaagatatctatgtaggttatcgttatttcgaaacgtttcgacctgagcgcgttcagtttgaattcggttacggcctgtcttatacgacgtttttggcccagaacgaagaagcaaaatccgtgtccaaagacggcgaaacctacattgaagttcgtgtcaatgtgaccaactcaggtacaacatatgcgggcaaagaggttgtgcaagtctattatgaagcaccgcaaggcaaactgggacaaccggtgaaggcgttggtggcttttggcaaaacaggattgttgcagccgggcgagtcagaaattctgacgatcagcttcccgatccatgccatggcatcttacgatgatgcaggtgttacaggtcttgcttccgcgtacgtattggaagaaggcacataccgactgcacgtaggaaccagtgtgaaacaagtgcagcatatcagcattgatggccaggatggctatactattgaatctcttcaattggtggagcaattgcaagaagcgatggccccaactgaagattttacacggatgaaacccggtaagcgcaaggaagatggatcttatgaactgacttatgcagaagtaccgaaacgtaagatatccatggcaaaccggattgagcagaatctcccgcaaacgctggagcagacgggtaatcagggctacaagctgagtgacgttaaagctggcaaagtgagtctggaaaccttcatcgctcaactgagtgatcaggatctggcggcgattgtccgtggtgaaggcatgagcagtccgctcgttacttcggggacggcatctgcatttggtggtgtcagcgacagcctgtttaactacggtattccggtagcatgtacggcagatggcccgtccggtattcgtatggatagtggcgagaaggcaacacaggtatccattggtacgttgcttgcggccacatggaacaaggatcttgttgaagagttgtatgtgatggaaggacaggaattgctgagaaatcaggtggataccctgctcggacctggactcaatatccgccggagcccgctcaatggccggaactttgagtacttctccgaagatccgctgatctcgggtgtatttgccgcagcatgtacgaaaggtatcatgaagggtggttccaatgccacactgaaacactttgcctgcaacaatcaggagaaacaccgcagtaaagtagatgctgttgtctccgaacgtgcactgcgtgaaatttacctgaaagggttcgaaatcgctgtaaaagaaggcggagcaaactccatcatgacctcctacaacccggttaacggacactgggcggcatccaactacgacctgaacaccacgattttgcgtggcgaatggaatttcgagggaatcgtaatgaccgactggtgggcgattatgaacgatgtgaccgaaggtggagaagctgatcgcaaatacaccaactggatgattcgtgcgcagaatgatctctacatggttgtaccgaactacggcgcagagattaatggctgggacgataatacaattgaatccttggaaaatggaacattgactcgcggagagctgcaacgctcggcgattaacatctgcaagttcatcatgaatgcaccggtgtccggcagaaaacacgagatcgtggagaacgtcgcttcattccaagcgaatgcatctctgtctgctgcacaagctcaagatctggttgagaacgcacaggtgaaacctgcggtagctgaaccggtctacatgaaagtggacaaggcaggccattaccggattatcgtacagatcatgtcccctgagccggaactggctcaaagtgcatgtaacctgctcctgaatgatcagttggtgaccaccatccaaacgaatggtacagaaggcaaatggatcagacagaaacttgtcaaagtagatcttgaagcaggactgtatgaattgaaactggacttcaccaaaccaggtctccagattgactggatcgaattcaaacaggtgtagaagataatcggaaatatcaggtgataagagcaatcgaaaggttgttctgtcatccaaagcagaatacgttggtataagacaaaggacactgtacgcgggtgtcctttgttgtaacacagaatagctactgttatgatagtgttatgagattcgtagttctgaacaatggggtcaggggtgttgcgaggaatgagaaattataattttttgagtccaatcctgctggttgtggtggcgctgattgtaagaggcctggtgactaacctgggagttcttttcggactatcacaagaagtggcgagtaatattgccatgatagccatgattattgctgcactgattatgtttaatcgaatgacgaaggctcggcgtagaaaatagaaaaagctcggataaccagaaggttatccaagacacgaagacatcctccgggtgtctttttttgtattgacgttctgatcctaacgttttagactattgctaataaataataacattaataataacgaaaataacaaaatgatcagacgaagtacatgaaatccgttgcgctctctatttgctagcccattccggtccccaaaggagaatccaatcatgaagatcattgccgacaaaccatatattgttcaggacggccagcctttgcagattgtcatctggaagctgaccgtcttcagataatgatgaagaaggaccgcaggagcgctgatgaagcgttcagtcggtcctttatgtcatggatcaggctgtgtgctgttcgagtgatgtctatcgatacgggttaacgatgcgagggttgggtgagaatacgggattgcaatctcggaagtatctacttacgacataatgtcctgctgatgatcaccttaatacgctggaataatctacgatgaagtgaagggagctacattatggaaagacagcctgtattggaagtcatcgctgtagatgcggcagatgccaaagcagctgaggagggaggggctgatcggattgagctggtgtctgcgatgtctgaaggaggacttacccccagttatggcgtcatagagcatgtggtatcccaggtatccattccggtgtatgtcatgatccgtccccatagccgctcgttccgctatagcgcagatgacatccacgctatgacccgggatgtacgcgtggcgagggaacttggagccgctggcatcgtaatcggcgccctcaccggagatagtgaagtggaccttttacccatgcaattatgtatggccgaagctcagggtttgggcgttacgtttcatcgtgcaattgatgtgagcacaagcttgactgaggcgctcaaggccattaacacattgggcaacgtagagcgtgtacttacatcgggagggaaacagacagcgcctgaagccatactggaactgaaacagcttcagcaattggggcaaaccttgaacatcgctgtcatggcagggtcgggggtcaccatagagggaattcaaacgatcgtgagtcagacgggtatcacggaaatccatatgggatcaggcgtgaggtacaaaggcagctttaattatcccattgatccacatttggttgaagaagccaagcagcagttattgcttgcatcacggccattcatggacagtagtgcactgagtagtggtccaagcaagggtgttccaatgatatagggatgcgctaaataaaaggagtgatacgccatgaatcgtgaactgcaaccagccgaatggattaagtccgcagcacaggtcagcccatccgaacgccagctgagatggcaggagatggagttctacgcgtttattcattttacggtaaatacatttacggatcaggaatggggcactggggaggaagacccggcgattttcaatccttctgaactgagtgcaacgcaatgggtgcaggcgtgcaaggctgcggggatgaaggggctgattttgacatgtaagcatcatgatggattttgtttgtggcccagtcagtttacaccgcatacggtcgcggctagtccgtggaggaatggtacgggggatttggttcgggaagtttccgatgcctgccgtgagggcgggttgaagtttggcgtgtacctgtctccttgggatcgtcatgaagccacttatggagattccgagaggtataacgagttttttctccaacagttacgcgagctgcttacgaattatggcgacatcttctgtgtatggtttgatggtgcatgtggggagggtccgaatggcaaaaggcaggtctatgactgggacgcctattatgcgcttattcgtgaacttcagcctgaggctgtcatctcagtatgtggcccggatgttcgctggtgcggcaacgaggcggggcatacacgggaatcggaatggagcgttgtgccagcgcatatgcaggataatgagaagattcaggagcaatcacaacaggtggatgatggtgagtttgccacaaggatcaatacgcaggacagtgatttgggaagccgagaggtcatttgttcccaaggtgagcaactgatctggtaccctgccgaggtgaatacctcgattcgcccaggatggttctatcatgccagtgaagatgatcaggtcaaaacattggaagaattgctcaccgtctattacggcgcagttgggggcaacgccacctttttactcaatctgccaccggatacgcgtggtctcattcacgaaacggatgtcgagcgactacaggaattgggagattcgctgcgaaccatttttcagggaaatttcgccttgcaggcgctggtaaaagcatcggagacgatggatgaacaacatgccgtatcggaggtgctgacagaacgccgggatacgtattggcgtccccttgaaggaacggagcaggcttggatcgagctggatttgcaggaagaacgatcgtttgaccgggtggtgctgatggaacatatccagacaggccaacggattgagcgttttacactggagtcgcagagagcagatggtggttgggaaacgttttacacggggacggtggtggggtataagcgaatttgctgtttcccacaggtcacatcgagaaagatgcgattgagcattcaagaatccagatggtgccctacgttgtctgggttaggcatatatctgagcgagcggggagggttgtaaaatggcggtgctgacgtatagaggttcacaatttatgtatgatggcgagcccattcggattttgtcgggtgccatccattatttcagagtggtccccgaatattgggaggaccggttactcaagctgaaagcctgcggtttcaatacggtggaaacgtatgtgccgtggaatgttcatgagccccagccggggcagtattgttttgaaggcatggctgatctggaacgttttattcgcattgcgggagatgtgggtctgcatgtgattgttcgcccaagtccttatatatgtgccgagtgggagtttggcggattacctgcctggctgcttgccgatgatgaaattcgtctgcggtgtaatgatgcaaaatttctgaagcatgtggatcggtattatgatgtgcttttgcccaaattgaaacctcttctgagcacccatggcgggccgatcattgcaatgcagattgaaaatgagtacggcagcttcgggaacgacgcgagttacctgcaatatttacgtgatggcatggtggagcgcggtatggatgtgttgttatttacctcggacggaccgacagaccacatgctgcaagcaggatcggtaccggggcatctggctacggtcaattttggatcagggacgcagggagcgttcgccaagttgcgtgaatatcaggcggacgaacctttgatgtgcatggagtactggaacggctggttcgatcactggggtgagtcgcatcatatccgagaagccaaagatgtggctggtgtgtttgaggagatgcttcgaacaggagcttcagtcaacttttatatgttccacggcggaacgaactttggattttataacggggcgaactgtcagcagaaggatcaatacgaacccacaattacaagttacgactatgattcactgctcagtgaatccggggagccgacagcgaagttccatgcgatgagggaccttattgctcagtatagcggcgaagatctgggtgagcttgtgctaccaaaatcgaaggggactatcgcctatgggcgagtggagttgaaccagcaggcgccattactggcgcagttggaccggatatcagccccggtgcagcgtacgaatccggaaccgatggagaagctgggtcaggattatggctttatttgttatcaaacccgaatatccgggccaagggagcgacaggaactggtggttcaggaggttcgtgaccgtgcgcttgtgtttgttgatgggcaatttcagggcgtgctggaacgggggaatacggcattatcggtttcctttgcagtgccgcctgagggcgcagatctattgatccttgttgaaaatatggggcgaatcaactatggtccgtacctgagagatccgaagggcatcaccgaaggtgtgcgacatggctttcaatttttatatgattggacgattcattgtctgccattaactgatctgtcggatttgcaattcagtaatgtgattaacgaagcaattaacgaaacaattaatgaagtacagggaccagcattttatcgaggagagtttaatatcacggatgtaagagatacttttctgcgactggatagctgggccaaaggggttgtatttgtaaacggattcaatctggggcgctactggaataaaggaccgcaaaaaacgttatatgtgcctgccccgcttcttcgtgaaggcgagaatgaaatgatcgtactcgagcttcatcagacggctgatctggccgtaacgtttgtggatacaccggatttgggctaggaaaaggaaaatagtagagccaaacgattattgggaattgtcgtgtccgccggaaaaaggtatacgttgggtatggacattgactacatgagaggatgaggaaaagtgaaagttggactcagcacctacagtctgcaacaagcattggatcgtaaagaattaaccgtgcccgatgccattcgctggattgccgatcagggcggggaacatgtggagattgtgccgatggggttcagtctgatcgataatctggagttgattgatgagattaaagctgtggcaaaagaggtcgggatcgacatttccaattacgccatcggcgcaaacttcgctgttcaggaggacgccgaagcgttggagcaagagatccagaatgtgatgcgacatgtggatgtggctgctgcgctcggcgtgaagctgatgcgtcatgacgtggctttctgccctgcaccagagggaactgtagcacagttcgagatcgacctaacggtactggtgaaagcctgtcagcggatagccgattatgcagcggattttggaatcacaacaagcgttgagaaccatgggtactatgtgcagtcgagtgagcgaattcagcgtttgttacacgaaacggcgcggagcaacttcaagaccacgctggatgtcggcaatttcctctgtgtggacgaagacccggtgagtgccgtgaaaaataacattccgtacgcgtcgatcgtgcacgccaaagacttctactggagaccttcctaccggaaccccggtgaaggctggttccaaacctcgcatggcaattacctgcgcggtgccattgtgggccatggcgatatcgacatgcctgaggtattccgtgtattgaaaaaatccgggtatgacggatatatctcggttgaatttgaaggcatggaggattgcaaaaccgcctcacgcattgccatggataacgtccgtcgcctatgggaagaggcatagggctgagtacttgttttaaatgaaatatggatagttacgtatggctcaaacggaaagttaattcagtcaggaaaagtagtggagggggcgaaatcgattctgaagaaacgaagagttcgcctttatcaacggatttcccctttgaagaaaggggattaaagaaatctggggataagagcgatcggaagaacgattcgcaaccggaacgtctacctgttggacgttaattattttatttatggaggaatcagcactatgcccaaattgaaagtcgccgttatcggtgccggatccatatccgattgccatttgcaagcgtacgccagtaacccggaggttgaaatatacgccatctgtgacctgaatgcagtacgtgccactgaagtcgcgaagcaatataatgcacctcatgtgtttaccgattataaagaactgctcgcaatgcccgaaattcattccgtcagcatctgtacatggaacgactcccatgcggagattagtattgctgctctggacgcgggcaaaaacgtgctgtgtgagaaaccactctgccaaacggtagaggatgcgctcgaagtagagaaggcggttcatcgcagcggaaagctgcttcaagtcggttttgttcgccgatatagcgacaatgcacaaattctgaagaagtttatcgacgagggtgaactgggcgagatctattatgccaaagcctccagtctgcgtcgtctaggcaatccgggtggctggttctcggatatcaaccgctccggcggcggcccgctgatcgatatcggggtacatgtgatcgacatatgctggtatctgatgggcagaccgaaggtgaaatccgtctccgctaacgtatccaatcgattaggaaaccgctcgaacattaacaatctatcgttctacaaagcagcggactatgacgcggagcaaaacaccgtagaggatatggcaaatgccctgattcgttttgagaatggcgcgagcctactcgtggacgtcagcttcacgctacatgccaaagcggatgagacttcggtcaaactatatggcgacaaaggcggtgccgagttggagccggaaatttcgatcatcggtgagaaattcaacaccattttgaacatgaccccacaggtagatttcaaatcattcgactttatgggatcgttccgcaatgaaatcaaccattttatcgatagcacacagggccgcaaagaaacacttagccccgttgaagacggcgtcgaagtgatgaaaatgctctgtgccatctacgaatcggcacgccagggccgcgaaatcacgctgtaaaggtaggattgtatttcgttgatactatagttgatactttactactcccgtggcattaaaagttatgagcacttcgctccttttcaatgaaaagctccgctcggggcgggattcggagtcggcttcttggcccgcggttggagtagagcagggagcgagtgctaacgaatctcaggcgtcttatttaaggattcgaagcgctggcagcaatctaaggaacctgacacatgctatatcagaataaacagcagtttacagcgtttttaccacctaatttcgggaaataacgtgtctgatgttccttacaatttaaaaagaggaacaaaaggctaaataagacgccctgtgttccttagaaaattctctacctattcaccaggataaacgggcttggatttcaagacgttataaacgcactgacatccatcatcgtaaatcttccctgaactgaagttgaagacacaccctatagaagacttaccgtttacgctataacagagagtgcagaaccaatccaaaacaacgaatcgcactctctctgatcttgtattccctatagaaacgagggaaataaggggtccatagtgattggagagggcaccgcaatcgcaacgacggacagactaaccctttataggttaagcgcatcgtttacaccaaaaaggagaacgcaaaaccaatccaaaacaacggagtgcactttctctacccttggatttccctataggaaatcgggggaaataaggggttccatagtgattgaagatggcaccgcactcgaaataacaaagttactacgccccttaatagttaaactagcgtttacgccaaaatggagagtgcagaaccaatctgaagaagcgaagcgctcgcctttatcactggatttctaacaattatacagtgaaataagagaaatctagggataacagcgatcgaaagatggtactgcactcggagtgaccaggcgtaacatgcatggtttatcttctatccaatccagaggagatgaaacaggatgagcgaagccaaagaaaccgtactggagcaggaagagcagatcgtcgaagctggcgtacacaattttagcaaagaggatgaatggatcaaaccggaggatccgctgctgaatgagcggttggggtggttcaaggatcagaagctggggttgatgatgcactgggggccgtattcccagcttggtctcgtggaatcttgggcgctgagcgacgaagacggcgattggtctcgcgatgacatcgactggacggatgacatggaagacttcaagcgggaatattttgatctgaacaaaaccttcaatccgattcgtttccagcctgaggaatgggcacaaatggcggcagataacgggttcaaatatttcctgttcaccaccaagcaccatgacggtttctgtatgtgggataccaagacgacggattaccggattacgggcaaggacacgccttttcatacccataagtatgcggacatctgtcgagcattatttgatgcatttcgggccaaaggactgggcatctcagcgtatttctccaaagcggactggcataccccgtattactgggcaccgggcatggagcgtggacgtcatatgtggcgcgggccctcgtatgatccccataagtatccgtggctgtgggagaaattcgtggagttcacacatgagcagatcatggagctactgacgaattacgggcgaatcgaatgtctgtggctggatgctggatgggtgcgcgaaggtcgccatggtcaggatatcaggctgggagaagtcgtggaacgggcgcgtcagaccacacaaccttggcttctgtccgcagatcgcaccgtgggtgggccgtatgagaatatcgttacccccgagcagaccataccggaacatccgatgaacattccatgggagagctgtattaccgtggggaactcctttgccttcggattcgatgatcagtataaaacgggaagacagctggcacatattctacttgaagttgtgtccaagggcggtaacctggcgctgaatgtaggtccacaacccgatgggcgtctgccaaaaggggcaattctaggcatcaagggcctcggtgaatggttgggtactcatggagaaggcatctatggaacccggatctgcggaccatattttacgaaagattgggctttcactcagaaggaagagatcaacaccgtatatgccttccgtttgtacctaaacgagaatgagaccgtacaaccacagttaatcattccttatcttgaaaaggtagagcgtatcgaactcgtcggtagcgatgacgtactttcgtatcagcaaacgggagacggacttcttgtggatctgccccaatccgctgcaacgagtgaagcgcccatcacacatacgttcagattgatcacaagcgcatagaggttgttcaaaaagtccccaattgatcacgaagtagtccacgaagtgaactcgacatcgaatcttgcgttcaccttcggagtccggtgctcatgtaggtttacctacactccgctcctcctccttcaggttctcgcaaccttctcggtgctgaatcgttaactttttgaacttgtatgtaaagaatgccatgtcaattccgggggagatataaccacctccgggatttttttattcatacataagggacacaattcccaatagaaacggctcgcaatcgcttgtcacacaagggtttgtggaataaagagaagtcggagaaaattgcaaattgataaaagtttatcgggcgatgtactatcaaatcaagaaagcgctacctgatatgaatgtttacatcatgtttgttaaacaaggaactatgaacagaaaaaaggatgtttaagggatgtaaatgtaatgtattattacacttgaggtgtagaaggagtgacgcaaatgagtcgagctacggaaagcatacccgccaagatggaactccaacagaggaaacatgtggagcccaagcggcagcatccattcatcaaaagcctcaagaaacactgggaactctacctgctcgtgttgcccccggtattgtatctgttgatcttcaagtacatccctatggtgggtgtccaaatcgccttcaaggacttcagtgtagtcaaaggaatctggggaagcccgtgggtcggattcaaacactttgaagcattcttccaatctccaaacttctggctgttaatcaaaaacacgataggcatcagcttttattccttaattgccggtttccccattccgatccttctggcgctggcgctgaatgagattcgaacgggttacttcaaaaagactgtgcagatggtcacttacgctccgcattttatctcaacggttgttatggtatccattatcattctgatgctctccccgcatgtcggcgtggtagacaagctgttcacactgctcggcttcccgatgacgaacttcatgggtattccggaatacttcaaatcgatctatgtctggtcaggtgtgtggcagggcatgggatattcatcaattatatatatcgcagctcttgctggtgttgatccatctctctatgaagcagcaaagatggacggcgcatcaaggcttcggaaaatatggcacatcgacctcccgtcgctcgttccagtcaccgttatcatgctgattctgagtctgggcagcattatgggcgtgggctttgagaaaatatacctgatgcagaatccactcaacacaagcgcttcggaggtcatctccacgtatgtgtacaaggtaggtctgatcggggcaaatttcagcttctcctcggcagtagggttcttcaactccattatcaacctgatcctgctggttatcgtcaacggcatatcgcgcaaagtatcccagaacagcttgtggtaaaggaggagtttatccatgttcaacctgattaatcgtaaccggatcaaggacccactcggtgaccgcattttcatgacattcaactatatctttctgttcgccatactgctaacagtgttttatccgcttttgtatatcatcagttcttcattcagctcttcacgagccgtgacatccggtcaggtgtggctgttcccggtcgactttaacatcaaggcgtacatctccattttcaaaagccaacagcttatgctcggtttctataacacgatcatttacaccgtggtgggcacgttcattaacgtggtgctgaccgtcatgctggcgtatcctttgtcacgaaaatcgttttatggacgaggggccatcattattttcatgatgatcacgatgttctttgatggcggtctgattcccacctacctcttgatgaaggatttgcacctgctcgatacacgttgggcgatgtggctgcccggggcgctcgcagtattccaggtaatcgtggcaagaactttcttccaatcttccattccggaagaactcggggaggccgcggaaatggatggttgccgggatatccggtatctgatcagcgtagttcttcccttatcaaagcccattctggcagtcatgacactcatgtatgccgtaggtcactggaatgcgtactttgatgcattgatctacctgcgttccgagaaattgttccctctacaatacgtgcttcgcaatctgcttatcctgaacgcggctgatccggcgatgctcgccaataccagccaacagatgcgggaccaagggttcgagcaggtgttgaaatatgcactgattgttgtcgcgagcattccaattctgatcatgtatccatttgtacagaaacattttgttaaaggggtcatggttggttccctgaaaggttaatccttgtgagttaagcccggttgcctcttgaaaggaggtggaaggaacacgccggcttccggggtcgattttatacacgtgcagtgcaagtcaataatttgccgttatgaacaaaaaggaggagtcagattgagaaaatcttggatttcgatgttgtttctggtctttgcttcgatggctttgttgtccgcatgcagttcatccgaggaatcgggtggaagtagcgacggtagcggggagagcggcggtcctgtaaccatgaccctctttgctccgcaaggcaaagcgtccatggaagagaatgaattcacccaatttatcgaagacaagttcgacgttaccctaaaatgggatctggccccaacggacgccttgcaggatcgtagacaattactgctggccagtggtgattatcccgaagtgtttcttcacggcaagttcaccacctcagatcttcaaacctatggaaaacagggcgtgttccttccactacaagatctaattcagaagtatggtccgaatctgaccaagattatggaagagaagccatacttcaaagaagctattacggcaccggatggcaacatctatgcgctgccgatcttcaatgaatgttaccactgtacgtatgcacagaaatactggatcaacacggagtggcttgataatttgggcctgaaaatgccaaccacaactgatgaactgtataccgttctgaaggcgtttaagacacaagatccaaacggtaacgggaaagcggacgagattccacttacaggcgcaccgaacaagtatgtatggaatggcaacattgatgcctacctgatgaatagctttatatacaatgacaacgacaaatatctgatcgtgaacgatggcaaggtgagtttttccgccaatcaggaaggctggaagaaagggctggagtacatgaacaagctctatgcagatggcctgattgatccggcttcctttacacagaatgatcaggcaattggacagctggggaacaaggaaggcgatgaagtggtcggctccattacaacggcgctggtcagttatctcgtgaatacttatgacaaagatatcacccgtcaccagcactgggagatcgttcctccattgaaaggaccagatggagtgcagacgacaggcgccacgcagagcgtaggtgagtttgagtttgccatcacgaacaaagcgacagaagcacagcagattgccgccatcaaaatcgtagactacatgttcagtgaagaaggtgcgctgtacgcggagtatggaccaactgaaggcaagggctggaagaaggcagatgccgatgagaaaaacatcaatggcgagccggccaaatacagctactacaacctgcctgagcgtgatccaaacgttgttgtgaacgagagttggtcacagatcggagcacatgacttgtccaacactttccgtaatctgtttgcggaaggacagaatcctttagaagcagagggttatggtacacgtctggctcaagctaccaatgtgtatgaaccttatgcacccaaagaagtataccctgcgaacgtatttattcgtccagaggatacggaatcagctgcacaactgactacggccatcaaggattatgtgcagacgaatatggcacagttcattattggcagcaagagcattgataaggaatgggattcgtatgtcaaaggctttgatggtctcggactgagtaattaccttgagatctaccagcgtgccattgagaagaatcaataattgaaggattcaatatagaggctgtcccgtctgtcacccgtgactgggacggtcttctcctatgacaaccccacgtcatccgatataatgtactgaatatttatggaaaattagcgatcagcacagatgtttgtcgtcattcagcatgaacagtaacggtggggggatctcggagatgaacaacaattggtttagacgtttgctgttatcgtatctgcctgttttctttattgtgacgaccattctattctttattttctttcaagtattcaatgaacagaaccgtagagaagcgctcaaggccaatgaatttctggcctctcaggtcacgcaatatctggacaactccctgcgttccatcgacttcaaggtactgcgtgagattttgaccaaccctaacttgaagaattatttctcggtatctggcagtgatgatgtgtatgccggcattcaggctgtccaggtggttgatgaattgaaaatagagtatccgctgattgattcaatttatctcgttcgatacggggatgacacggtcttcagtaacgggaaggctgttccgattgaagagttcccggatgcagactttattgcagatagccggtcaagggatgaacagaagtgggcaggggcacgagcgttccgagcttttccttcacaagcgacggagcaggtgattacgattgtgcgaagtgtaggaaacggcaaaggacttgtggtgacaaatgtggacctgagtaccctgaggaaatccattatgcagatgtatgatccggaatttacgtttgtgaacatcttcaaccgttcgggcggcaatctgtgggatagcagcatgccaggaggggttgcggcttctactaaaaccacgtcgggagaagtcttctccgaatttacgtcgagttatagtggttggaaggtgcagacaggtctcaacaatggaaaaatcgtcaaatggactctgcaattttataatatctggtttgcctttgctgtagtggttgtgttaatcggggtggtgtgggtgatctacgtgacccgcagaaattataagccgattcagcagattgtcacgttaattcagaccgtctcttcgcagaaacaatcggggctgggctatggcaaggagaatgagttccgattcatccatacaacgctggaacgcatgatcgatcagacgagacaatatcaggaggagcatgaagagaatctgattttgcagaaaaaaatgttctttcaggagttgttggagggcacgcgagactttacgagcacggagctgacagcggagatgaagaagttcaaactgcctgagctggagcatcgttgggccgtcatggtagttgaaatggatcggtatgatgcatttgtgacggagtatcatgatcaggaccaatccctcctgaaatttgtgttatccagcatcctgcaggagagtgcccgtcatgaaggaacggaagtatgggctgaatggatctccgatcagcgtctgtacgccatcctctggattccggaaatggaacaggccgaggagactgagcatcgattgcttgctggttatctggacagaatcgatcagtatttgaacttcaccgtgaccattggtgttggtcgggtcgctgttgatattcgggggctgagagcttcattgaaagaagctgtacacgcgctggagtacaaggctgtactggggataaatcgtattattccgtgtagcgatgtgccgaattcgaccaatgatgtgtatgagtttctgaagaccatctcactgctcgtgcaggcaatgcgcttgtcggacgatgtctgggaaaagcattttgaaagactgtttgaacagattagtgagtccgttctgtcccgtcaggagattatgaatacgatccaattgttatttcaacattacaatcgggaattcgccgaacttccacgggagtatcaggagtcatgggctgctatattcactccactgcttccaaggcttgagggctgggagacgttaaacgatctgcgtgagctgtgttgggaagggttcagggaactggcactgcagatgcagacgctgcattgttcccgaaaacacagatcacatattctggagattcgcaaatacatcgaagagcattacaacaatcctgatctgtcactgaactaccttagtgatctattcgatattaatccgaagtatctgagcaagcttttcaaggatgagattggggagaagtttgtggatctgctcattagtcatcgtatcgaaaaagctaagctgctcatgcaggagacggataaggctattcaggagatcagtgaggaagtgggatacacaaactataattccttcaaccgggctttcaaaaacgtggtgggtgtggcaccaagtgactatcgcaaagccatgtgagtgcacgcgcctaactaattccgaacgcataaggagaatgtgcatatggactataaagatgcttcgcttcccattcaggagcgggttcaggatctgatcggacggatgacaacggcagagaagattggacaactcattcagccgatgggatggaagacgtatgataaagcagctgatggtacagtacaggtgacggaagagttcaaagcgtacatggaacaggggggtgttggttctctgtacggtgtgcttcgggccgatccatggactgaagtgacacttgagacggggcttaccccacggcagggagccgttgccacgaatgtcattcagcagtatgccatggagcattctcggctaggcattcccattttgtttggagaagagtgttcccacgggcatatggcgattggggcgacagtatttccggtaccgttaacagtgggcagcacgtggaatatggagttgtaccgcaagatgtgtgaagccatcgctgtggagacccggagtcaggggggagcggcaacgtattccccggtgcttgatgtcgtgcgtgacccgagatgggggcggacggaggaatgttttgccgaagatccctacttaattggtgaattcgcagtggaagccatgaagggactacagggtgaccgccttgattccaaccagacaattgtggcgacactcaagcattttgcggcttatggcagctcagagggtggacgtaatgctgctccggtgcatatgggattacgtgaattacatgaaatagatctgttgccgttcaaaaaagcagtggaagccggggcgagctccgtcatgaccgcttataacgagattgatggcgtaccgtgcacgtccagtacgtatctgctgaatgaccttctgcgcgagcagtggggttttgatgggtttgtgattactgattttggcgccattcagatgttggtccatggacataacactgctgagaacggggagcaggccgtggcacagtcccttcaggcaggtgtagacatggaaatgtccgggtacatgtaccgcaaacatcttggtcaggcgcttgagcagggattgattcaacaggaggatctggacttggctgtgtggcgagtgctggagatgaaattcagacttggtctgtttgaacaacctttcgtagatcctgactttgcagaacaggtcatcggatgtgaagaccatacacagctggcgagggaagttgcacaagaggggattgttttactgaaaaatgagggaaatactcttccgcttgccaaaacaggtccaaagctagctgtcattggtccgaacgcgaaccatatctataaccagcttggagactatacctcgccacagccgagagagcagatcttcaccgtactggatggcattatacgcaagcttggtacggattcgagtcaggtgctgtacgcaccgggttgccggattaaaggcgattccagagaaggctttgcacaagcgctcgcctgtgcggaacaggcagatgtcatcgtgatggtgatgggtggttccagcgcccgcgattttggtgaaggtacgatcgacttgcggacaggtgcgtctgtggtaaccgatgatccatggaacgatatggagtgcggtgagggcattgaccgggcttccctgaatctcatgggtgttcaattggagctggtgcaggaggtacataagctggggaaacccgttatcgttgtgtatattaacggccgccccattgctgaaccttggattgataagcatgtccatgccattgtggaagcgtggtaccccggacaggaaggtggtaacgcgattgcggatattctgtttggcgatgtgaatccatctggccgtcttacggtttccattcccaagcatgttgggcaacttccggtctactatcatgccaaacgcactcgtggcaagcggtatctggagatggatctggcgccgcagtatccgtttggatatggactgagctacactgaattcaaatacgagaatgtaagagtaatgccagaaatcatcggcccggacgatgaagctcaggtgatggttgaagtcacgaataccggagcggttgcgggaagcgaggttgtgcagttgtacatcacggatgtgtcggcttcggttacgcgggctgaaatgtcacttaagggttttcgtaaaattcatctgaagccaggacagacccagaccgttacattccctgtgcaaaaagaacatctcgcactgatcgactcccgtctccagtctgtcgtagaaccgggtgaattcaggctcatggttggccgcaattctatgaattggaccgcctgcagtctgcacattcagaaggtgggggtggaggtatgattcgaattcagcgattcatcgaagatctgaaacagcggcaatggctggatacgatcgagcttccagcgtgggagatgcagagggccagatacattcggccaggggaatacgagtacgaacaggcagaagtaaatgaagatgagcagtcccacaaggcagtgcaaaacttgaatccgctgaacagcgtacatggaacgacgtattttctgagcaaaattgtggagattcctgcggaatggcaagatcaagccgttgggctgatcttcgaggccggaggagaagggctgcttaaggtgaatgacatgccttatcacggattggaccggaaccacgggttcgtaccccttccgagaagtcgggtaggaaatacaccgcagttggagattgaactctacgatccgattccagagccgcatgatccactcaaccgacaagctgtcattcagccgcctattcagggcattcgggcagcgttggttcatgttaatcagccactgcagagcctgatgtacagcgtgacggtactcgccgagtcgctccgggcatataacgagaaggagcccaagcggatggcacttgttcaggctattcatcaggtgatggataacatgtacaatgacccggaacgctggaatgatgcaacctggatacagaacttcgaatatgtattagcacagtcagtacagcaggaagacccggaggaatatcgaagtggcttcatgcatctggttggacaatcccacattgatattgcctggctgtggcctgtacgtgagacggttcgcaagtccagtcgcacgttctcgaccatgtgcaccttgatggatacgtacccggattttgtgtattcccagagccaaccgcagttgtacgccttcgtgaaggatcattacccggagctgtacgagcgagttaaagcccgtattgctgaaggccgctgggagctggtcggaggcatgtgggtcgagccggatctgaatattccgagtggcgagtcgttagttcggcagattctgtatggacagaacttctatcaggcggagtttggcaaacgctccaacatcgagtggctgccggatacctttggctactgtgcttccttgccgcagatgctgaaactcgcggatattccttattttatgaccaccaagctgaattggaatgataccaatgcgtttccgtatgacctcttcgactgggtaggcattgatggtacttcggtgcttgcgtatctgaaccatggggtgaatgagcatacacgtcccaaagatgtggatgaacattggcaatcatttaaacaaaaggatgttcaccctgagcaaatgttgctttacggacatggcgatggtggtggtggagtgacgaatgagatggtggagtttgcggagcgatcccatttgatggttggacagccaatcagcaaattcagcacagcaggggctttttttgaagacatatcattaaataatccgacgttgccgaaatggcacggggacttgtatctggaactgcatcgcggaacgtatacaactcatgcgaggaacaaacgtagcaaccgtaaggcagaggtattatatcgggaagcggaaatctgggggcaatttgccggggcttacggcgcgcacacgaagaatgatctggatgaaggctggaagttgattatgctcaaccaattccatgacattattccgggaacgtcgattcctgaagtatacgtaacgtctaccgaggagtacacgaaggtatttgcactgggtacatccgcactgcgggaaacgctcgatacacttgcagagaacattgcaacagatgaagtcgatggtctcccctatattatattcaacagccttggctgggaacgtggagagaatatcaccattacaggggatgcccacctcgccgggatggcagcatttgatcgtcaaggaaaccgtctggcctgtgatcttgaagaaaaggaagacaagtatacgctactcgtgcatgttccatcgattcctgcttttgggtatacaaccatatggctgcgcgaggcatcggatgttatccttccattaagggaagaagaatctttcccttccacgtgggaaactgaattttacacgcttgagtttaatgacttgggagagatcactcgatggtatgacaaaacggtaggacgtgactggctgaagcccggtgatcgggcgaatgagtggcagtttttccacgacaaaccgacgtactgggatgcatgggatatcgatccacgatttgaatcccagcgagctggtgcggtgcagttgatctccagagaggttgtacagcgcggggctacgcgagatgtacttcgttttgtctggaagctgaatcaatcggagatcagtcaggatatcattttgcatcgttaccagcggcgtgttgatttccgtacaaaagtgaactggaatgagagccataaactgctcaaggtggcatttccggtggacctggtggcagccaaagcggcttatgaaattccgtttggagcgttggagcgtccaactcataacaacaccagttgggagcaggcgcagttcgaggtctgtggacatcgttgggcggatatctcggagggcaacagcggtgtgagtttgctgaatgattgcaagtacgggtatgacatcaaggatcggacgatccgcctgtctctgcttcgtgctccgaaatggccggatgaacatgccgatcagggcgatcatgaattcacgtattcgatcctgccacaccagggcgattggcgacaagctgccgtcgttcgccgggcgatggagctgaatcatccggtcgaagttgtggcagcgagtcagtcttccggtcacttgccagctgaacatgcttgggttcagttccacagtgaacatgttattctggatgcaatcaagccagcggaagacggttcgggaacagtactacgtttctacgaatcatccggaggtcgggaaacggtgcaggttcagtgggctgaaaaggaaatcaaagcgtccatcattaatcttttggaggatgagatccatccgttggcttgttcaaacggcacaatcgaattgacattcaaaccttatgagatcaagtcggtgaaacttgttgatatcagtaatgagtcgaaccttacatttacatgagaacgtagagttactcactcaatcacaggaggtatgacatgaaattaacgaataagatcggtgtcatcgtggatagctttggcgtaggtgtacgggaagggttgaacaaagccaaagacgtaggtgcagaaggtgtgcagatctacgccgtcaagggagagatggaccctgaaaatttgtcacctgcggcgcgtaaagagttgaagagttacatcgattctctgggtcttgaaatttcagcactggttggcgacctgggtggacatggttttcaggtcaaggaagataatccgtggaaagtagagaagtcgaagcggatcgtggatctggccctcgatctaggcaccaacattgtcactacacatatcggcattgttccacatgacccttcatcagaagtttatgccacgctgcatgctgcttgtgaggaactgggccaatacgccaaaagtgttggcgcatactttgccattgagacaggaccggaaacggctgctgacttgaaaggattcctggatacgttatcgaccaacggagtatcggtgaattttgacccggcgaatatggtgatggtgactggagatgatccggcgcagggtgttcgtctgctcaaggattacatcgtacatacccatgtgaaggatggtgtgcggctgaaggaagttgacccacgagacgtatacggagcggtcggttatgcccctatggatcacgataagatagccgaaatggtctcatccgggactttcttccgtgaggtgccgctgggcgagggtggcgttgattttgacggatactttgcagcgcttcaggagattggttacaccggttatctgacgattgaacgtgaggttgggcatcaaccggagcaggacattcgcaaagcggttcaatttatccaacaatatcgatagggagctgagcagatgaaagtgggcctgagcacgtatagtttgttgaacgatttgaattcgggtgagatgacggtgctggatgtgatcgactggattgcggcgaacggcggcgagcatatggagatggtaccttacggttttaccgtggaggataatcacgatctggcggatgcgattcgggaacgggcagcgtatgcgggtattgaactgtccaactactcgatgccagcgaacttcgtgcaggagacggaagaggcgtttgcagaagagatggctcgggtcaaaagacatgtggatgtcgtacaccggatgggtgtaaaacatctgcgtcatgacgtcacggcgtttaccctgccaaaggagaagatgaccatcgcctggttcgagcaaaatctgcctctgatggtgcggggaagccagatcattgcggactatgccgtgcagtttgacatcacgacaaccattgaaaatcacggcttcagtgtgcaggcgagtgatcgggtgcagcgtgtgctgcatgctgtagatcgtccgaacttcaaaacaacactcgatattggcaacttcatgtgtgtggatgagaatccgatcatcggtgtcatgaaaaatctgccgtacgcttctctggtccacttcaaagatttctacttccgtccttatgatgagcatccgggtgagggtgaatggtttacgacagcctacggtaacttcctgcgaggagcgatcgttggacaaggtgacattccaattcgtaaaattgtaaagctgatcaaagactccggctatgatggcaacattacggtggagttcgaaggcatggaggaatgcaaatccgcatccaaaatcgccatggacaacttgcgccgcttctgggaagaggcgtaacgaagcatgatgaaacataataagggaatggatcaagggccacttttcgaagtggctcttattgttgatcattaggattctggactgtccatcggtccaggatcatttcgatgtaacgcatggtttccgttgtcataccatatacacgagctgaccgatcatcccctggggtgatataatcccaatatttttctgccaattctgcattcccttgaaaagccctttcagcataatcagagattcggatggccagtaaccgtgaggcttcggaatccggaggttccattttgcatgtatgaacatctttaagaatatcagcccattccatggatattgaattgttctgattattcagaggtaacgattccatttcttcaggtgtaaaaacatcttgacggaacttgcccggaggttgatccagttcacggatgaaacccaacatctcatccagactgattgtaccggaggctctgatggcatatatggttgaaaaaagaagatgctcgaccttgcctaatctctcctgctgttccttaacgacggccaattgttgttccaacgtattattccataaagtaagggtactctctggttcagagcgagcagcatcctgatcgaggaattctccaatctcattcaatttaaaatgcattttcttcagaatggtaatctgctgaagccgtaaaatatccttttcaccatataagcgatactgattgttctcattacgggccggtcgcagcaaacccagcttttcataataatgcagtgttcggatggatactccggtatgtttggatagttgtccaacggtatacaacaggcagatccctccctcatgatttatgtattctccaccagcgccatgcattgagcaccgccagaatgatcccaccgacgaagattatcatcatatacaaaataaatatttcggccaacccgttatcttgcgtggtatagcttaacaatgccggtctatcacctggcataacaacgaatctggctacctccaggtaagcgatatgaaatccgatggaggcccataaagatccggtcaaactgcgcagaagctgtaacgtgataccataggtcaagagcaggatcatataatccaaggttatccggtttccggcatccataccgacgagctcttgcaataggctcacactcatcggaaccagcagaaagagtatgatttgagttacataagcgaaaaacacaggaagtcgcagtctgaagcgtaatccatcatagaccatgcctcgcatggatagttcctctggcaaagcttcatacaagaaagcaatacaactattaagtacgacaacaagcaagaactcggctgagaagtgccactccgtaatcgtaatccagttgttcatactggctatcgctaacccgatgaaggccagagaagtggcaaataatgcgccaaagagcaagtgaactatgctttttcctgtcagaggaagaagaacggacttcatatggaagtgtcttcgaatgacgaatagtacgggcaagacgatactaataatgacaacagcttgggtgagatgaaccatccattcagcagcaccaatagtgctgacaaactcccctgcgagtgtagcaaaaaatagacccaatgtcatcgtcaaccaactcattccaataatggctattccactgctgcgtcgtttcttggttacatgttcaggtgacatactcatgctaatcccctcctgaagccagtataaaccctcgagttaacgtcagggtcaagcaggaaatatgcctatcagaatatggttctgcgcaaggattaagttacgagcagcacaagtgtggtatactggatatattcagcctgataataactggctatggataggagatgtcactgatctatgcaggtattcgaggactggaatcagaaagtaaagaggacgtttaatgctacgaaccccgaggtagtattgacggtatcggaagctggaagtttgcttggtttgaccaaagaccagatgaaactgtacgtggacaagaacaaactaacgaaggtcccgatcatgagaagtgttcaccgatacctcttattgaaaagtgaaatagataacatcgttcaagctcgataacttcataggattgaacacaaccattttaccgataggattcgggagagtggtcttttttttatctgaaaggggacagaacgtgctgaataaagtgtcaggttggttctatcagcgggtgaattggaaatgggttgtagctgcgattgttgtttttgcctgttttattgcattcattctgccctcgcaggcggcaaagtcggaggaagccacaggtggtggacagtccccggattcatcgtttctgtacacggcggatgatctttatcagatggctgaacagtatggtgaagcaggacggagcgcctatattcaggcacggttcacatttgatctcatatggcccttagcctatctgttcctcttagttgttctgttatcgatactctatcgtgtgcttccggtaaagagtcgctggcgttgggtgaatctgattccggtcttaggttgggttatggacatgcttgaaaatataggtgcgtccctgatcatgcatcgttatcctgaacgtacgcctgtgcttgctgaactcactccgatatgtaccctgttgaaatggtgtctgatctatgccagttttgcagcaatggttccgggtgttctgatcacggttctctactatatacgcaagcgtaagaagtagtggagagagggatggattaagaatatgttggtaaccctaatcttgtaaaggtccgcagagatgagtgcagaaatatacgcttgtcaaaggacaacctgttcatatatactcatgtcgcaagtggcgtgaatcgtataattacaagagcccaaggagatgaagaacgcatgtcgatcagcttgaatgtgtatctggttacagacggtaatggacgtgaagcggtagatttttatcaaaaggcatttggagccgaagtgcttgcgcttcaaacatttggcgacggtccatctgacccgaatcaccccatcccaccagaagcgaaagaccgtattatgcatgcttctttgcagattggcagctcggtattaatgttgtctgatacatttccaggcatgccgtacactgtaggtaatcatgttacggttacggtgaacacggatacggcggatgaagccaaagcgattttcaaccagttgcaagacggtggcgaagtgaaaatgccgatacaagaaacgttctggagtccagcctacggttcggttgtcgataagtttggcgtacagtttcagatcagtgctacgccgggacaagcttaagagtgtactcttcactaaatataaacttcaaatggcaaaaacctccgcaatctgctttgagcagttgtggaggtttttttgctttttttgtaatgactcgtgattaatcttccttgattagtcttccttctgaatcttggaaggattgttgattttatagggaaccgggttacgtgtcagcttcttcttgataatttttgcttcaaacgtgataacgtcgcccacttccagttcctgtttcttaacggtggcactgtggcttgaccaggcttccccaacatcaatgacgtctggctccgtaatggtaactgcttcatagatgatgacttcatcgtcattgtcagagaagtgattcggtacggtggtgaactctttgacaacggcactcatcttcactttaccttcgggcagatcaatcttgacgctcttagctttgctcgctgttttggctttgggtttggcttcactggctgccccagactgaggtccaacatactcttctactagcccatccggatcaccctttagcccagaggagaattcatctgtgtccgtatcgtccgtatcatccagatccgacggaatttcatccggattaaccaaggcatctggagtttgcgtaagttcagcaggggtaactggtacgactgtatccgaagttgagggttctgtgctgcgatctgacccgacattacttatgcttctggcgctgtaactggacgcttgcatttccttcagatacgacgggtgaatacaatgcttttgtccattatccagttgaataacggctgccatgtgatcgacatatccaatgatggtgcacggcatgtttaatccgtttcctttataatagaacgttttgagtttggtcgctttaccagaaagcaggccccactcctgacatttctcaatcagttcatcttcgttatccagcgcaataaaatcctgcggttcaatcataaatgcgtatgtcatatggaatttccgcccttccaatccattcttcatgttcatcgtttccaaattacaaccagtgtatcacaaatgagcattttgcataaatcgaaacgctgaaatctgtactcggagatgaagattatcaacgcctgctaacagaggcctatgctataatttgatcagaatgtaaggtgggaaggttgccttgatatacatatttcaggaagggaagatctgcatgaagaaaaaagtaaatcatcaagctgtatggcttgctataggtgttgccatgggagtcagcattggtacggctacacagcagcttggactcgggattgcttttggcttggcgcttggcatagtgattggttcggtggttagcaaacgtgcggggtcagactcggaacatatgctcagcgagcatgtccgggaattgcacaaaccagatgactgggaagacgcgctgcattgctcgcaggatcatccggtgcttatcctgaaacacagcacgacttgtccaaccagtgcgagagcgtacagagagtttatggcgtttgtaggcacccatgcatcagatcccaaacaacctatggactaccgcatcgtcaaagtgattgaaaatcgctcgttgtcccgtcacattgcggaagagacagaggttcaccatgagtcaccacaggtacttctgctcgatcagggaaaagtcgtccatcatacctctcatggcaaaatcacgaagaagagattattgcagtgggcacagaatccatttggataaatagtaaaccttatagacccgttcttttcagcccattgctgaggagatcgggtcttttttacgctttttttacacctgtggaggcatttctttaccccttttttacagcgtttcatattacgattttacatgtagcaggtgcagagaacggtagagagagggaggaagggcgcatggtgaatgatgccacgatgattggattggttgtgctgctgtttgcagttttctggggatttgtgaaattctgcgagaaggcttgagggtagagagggggatgccaaatgatcgtcatcggcatgattgtgcttgcactggtgatatatctcggttatgtgctggtgaagccggagaaattctgatgctggcgatgtgcgtaatacgggaacaagggaacgtcgaatagggaggaaatgcggatatgggtatcggtgtagtgcaagtagcagtgacgctactgatcatcctgctgttggttaaaccggtgggaaaatatatagtgaacgtgtttgatggacagcgaacggggctggatcgggttttcggtgggccggagcgactgctctatcgagtgatgggggtacgggagaacgagtccatggggtggaaaaagtacctcacggccgttctcctctccaactttgtaatgttggtattgatgtttctggtgctgcggctgcaaaaatatttaccgctcaatccggatggaatcggcaatatgccagcggcgcaggcatttaatacggccgtttcgttcatgaccaacacgaactggcagtcgtatacgggcgagaacgccttgtcgtatctgtcacagatgctggccgtgacgtttccgatgtttacgtcggcagcgaccggattcgcggtggctattgcgttcattcgcgggctgataggccgccgggatgaactggggaacttttacgtcgatcttgtacggtcgattacgaggatttttttaccgctgagcttcatcgtagccttgttccttgtattccagggggtgcctcagacgcttgcgggagcggtgaatgcaaccacgctggaaggcgcgcagcagacgatcacacgtggactggtcgcttcgctggagtcgatcaaacacattggcaccaacggtggtggctggtttggaaccaatgctgcacatccattcgagaatccgacggccctgagcaatctggtgcatatcgtctgtatgatgctgttacccactgcactggtatacgccttcggcttgatggtcaataaccggaagcagggttgggcgttgttcgcggcgatgagttttcttttccttgtgatgttgaccaccgtatttgtctccgaatatcgcggtgtacccgcgctggatgcagcaggtctacagggcaatatggaggggaaagaggtcaggtttggcatacccgaatcggctttattcacggcagtcacgacagcggctacaacaggttcggtcaacaatatgcacgagtcgctcactccacttggaggcatggtatcactggctcagatgatgctcaataacgtgtttgggggcaaaggggtagggctgatcaacggactgttgtatgtgattctggctgtgtttatctgtggattgatggtaggacgaacacctgagtttctgggcaaaaaaatcgagggcaaagaagtgaagctcgcatccatcgccttgctcattcatcctttgattattctggggccaacggcaatcgcgcttatgcggcctgaagctattgcgtccatctcgaacgggggaatgcatggcctgaccgaagttctctatgcttttgcctcgggtgcggccaataacggatcggcctttgccggactgaatgccaatacagacttttacaacatcgcaattggtatcgttatgctgctgggaaggtacgtatcaatgattgccatgctggctattgcaggttcactcgctacgaaacgggttgtaccggtaactacaggtacgctgcgtacacacacgcctctatttgctggcattctggtcatgatgatcgttgttatcggtgcactcacattcttcccgtcgcttgcccttggaccgattgcagagcatctggcgatgattcaatgagggatatgacaggggagcaacagaggaattggtatggtataaggacgtaacgtacggaggtggcagtgcacgatgaatgcagtcgaacgaaagaaggagcagacgatgcaacacatggatacagaaatgtttagaacgaagggcaatgagccggataacaaccgaggtaatattcaacgtgatcccggatcgaaacggtcgttaagcaaggatatgatacttcaggcttcactcgatgcgtttaaaaagctaaatccgatggtcatgatcaaaaatccggtcatgtttattgtcgaggttggtacattcattacgctcttactctgcatcaatcccgatctattcaccgtctccgaggctgggcgcgggtacaacattgccgtgtttttcattttgctgttcacgctgctgttcgccaacttcgcggaggcacttgcagaaggcagaggtaaggctcaggcggatacgttacgcaagacgaagtcggacaccctggccaatctggtgcagaaggatggaacaatccggcaagtgtcttcgacccagttgaaaaaaggtgatatggtccgtgtggaagtcggtgaactgattccgacagacggtgagattttggagggcttggcctccattgatgaatcggccattacgggagaatccgccccggtcatcaaggaagcagggggagatttctcctccgttaccggggggacacgtgtcgtgtccgattacatcgtcatgcgtgttcagaccgatccgggggagtcatttcttgaccgaatgatctctctggttgagggggcacagcgccagaaaacaccaaacgaaatcgcgctgacaaccctgctcgccgtattaaccctaatctttctgattgtcatactcacgatggttccaatggcgaattacctgggtattcgactggatctggcgacattgatcgcactgctcgtctgcctgatcccaaccacaattggtggattgttatcggccattggtattgccgggatggaccgtgttacgcagtttaatgtgctcgccatgtcgggtaaagcggtggaagcagccggggatatcgatacgttgattctggacaaaacggggacgatcacatacggaaaccgtatggcatctgaattcattccagttcagggcattacttcatcagagatgacgcgggctgctttacaggcttctgtgcgagatgagaccccggaaggacgttctgttgtggaattggcaggcaaacaaggccaaagttggtctgagacggagtatgccaatgcggaaaatgtggaattcacggcagagacccggatgtctggtctgaatctgatcagcggaatgaagatccgcaaaggagcggtggatgcaatcaaacgttatattgcttccgaaggaggccgtataccgggagatctggatgagattgcaaatcatattgcgaaggccggaggcacgccgcttgctgtgaccattgatgaacgaatctacggtgtgatctatctgaaagacactgtgaagccagggctgaaggagaagttcgctgagatgcgcgccatgggcatcaagaccattatgtgtacaggcgacaatccgctgaccgcagcaaccatagcgctggaagcgggcgtggatgattttattgcagaagcgaagcccgaggacaagattgcggcgatcaaaaaagagcagcaggagggcaaacttgtcgccatgacgggcgacggtaccaacgatgctcctgctctggcgcaggccgatgtgggcctggcgatgaattcgggcaccatggcggccaaagaagcggccaacatgattgacttggattccgacccgaccaagctattgtcggtcgtctccattggcaaacagttgctgattacacgcggcgcactcacaaccttttcgatatccaatgatatcgcgaagtattttgccatcattccagctatgttcattctcgccatgccacaacttcaggcgctaaacattatgaatctggcttcgccgcagtctgcgatcctgtcggcgctgatcttcaacgcaattattattccgatgcttattcccattgcgatgagaggggttaagtatcgggcgatgtcagccgaacgactgcttggtcgcaatgtgttcatctatggcgtaggcggcgtgattgtaccttttattggcattaagttgattgacctggttctgtcgggaatcctttaacgagataaaatgcttatcaaaatgtttttttatcctaatgaattcaggaagtgatctgtatgaacatgttcttgcccgccatacggttatccgttgtgcttatgctgatatgcggcctaatctatcccctcgtaacgactggcgtagctcaacttctctttcctgcgcaggcgaatggaagtttgattacgcaagatgagaaaatcatcggctcgtccctgctggcgcaggaaatccaatcgccggggctgttccagccccgggcatcaaatgccaattatgatccaacggcttcagccggttcgaatcgcgccgtagcctcggaggagtatatcggcgagatgaaagaaaagattgctcagctccagcaggaaaacccgggattgaagcagatccctgctgatctcgtgacgggttcaggctctggacttgacccggatctctctcccgaagccgctgaggcacagatcccgcgcattagtgaagctacagggcttagtgaacagcagcttgtgcaacttgtaaatgagcatacggaaggccgtcagatgggtatattcggggaaccacgtgtgaatgtaacggctctgaatctggcgctgacagcagaactgaactaacgaacgaacgaacatattagcctgctctcgatatatcgggaggggctttctccatttttatcttcacattaacaagaaaggggagaggacggatggaagacagctttaagcgcaagtcaccggaagagatgttgaagatgattacgaagctgcagcagggtaccctcaaaatctacatcggcccagtcagcggatcgggcaaaacgtatcacatgctgcgggaagggaacacattacgccaacagggcattgatgtggtcatctgcgccgtgtccacgatgcgcagaccggaaacggtagaacagcttggcgcactcgaaaggattccaagcattcactgggtgcgccagagtgatgatgtagagatgaaggatctgaacttggatgcactattggcgcgtaatccggaggttgtactggtggatggtttggcacatcgcaacagagaaggtgctcggtatgctacccggctggaggatattcagtttttgctccgaaacaacatcagtgtcatgacaacggtgaatgtgtatgagctggaagggtataccgagctggcacgacaacttacggggatcgcagcagaatatacggtgcctgccgatacattggagcttgcggatgaagtgaagctgatagacgtcacgccggaaacgatactgaaccgtcttgcagagggtcatttgcagggacatgagggtgaagctgtatttcgtcaaggtaatctgggtattctgcgcgaactggccctgagattggttgcggaaggggtgaatgaatccctgcgtgagcatcgggaggagatgggaattaccgtcacaacaggcatcatggagcggattctggtgtccacccaatatcattggaacggctccatctatatccggcgtgggcaacagattgccaaacggctgaatggtgatttatgcgctgtggtttttcggaatatgaagcagccattaaccaaagaggcaaccgtatttcggcgtaatatgatcaagctggtagagaagtttggcggccatatggaggagttgtctatattacaccgtcgcaacatcccgtctacgctggcgcgttacgccatggagcaccagattacccggattgtgatgggacactcccggcgtacacgctggcaggaactgttgcaagggtccgttgttaactcgctgctacgcagattacgtggcgttgatctgtttctggttgctgatcgagctgcccgggagggtgaacgtgtggttccggccaaggtaaacgatgtggagtcactgacataccgcagactaagcgagcaggaaatgaaggaacagattggccagattcagcgcggtacattcaaaatatatatcggagccgcgcccggtgtaggcaaaacctacatgatgctgcgggaaggcaatgatttgctccgtaagggcatcgatgtgcaaatcggtttgctggagacacatgggcgggcggaaaccgtggagcagatgggtcacctgtctgtgatccctcgcgcgaagcgcgtttatcaggagactcgtctggaagagatggacacggagggtattctgcaactttgtccggaagtggtgcttgtggatgaactggcgcatacgaatgtgcccggaagtgtccggcaaaagcgttatgaagatgtcctgctcctgctgaatgcaggcatctcggtgattaccacaatgaacgtacagcatctcgaaagtctgaatgatgccgttgaacatattaccggtgttcgtgtccgcgagaccgtacccgatcggatcattcagatggcggatgaggtgcagctgattgatgtggcaccccaggccttgcggcagcgcatgagggagggtaaaatctatgcaactgccaaggtcgagcaagcccttgcgaatttcttcaaaatcggcaatcttattgccttgcgtgaacttgccctgcgtgagttggcggacgatgtggatgaacggcttgaaacacagcaggccaaaattgcacttcgaggaccttggcgcaggcaggaagcagtctttgtatgtgtaagcagtgatcgtcatgccgagcggctgatccggcgcggattccgcatggcttatcgtctaaaagccatctggcatgtacatcatatccacatcggtgagtccatgagtgacgaagtgaagtgccatctggaagcgttggagcagttgacgattcggcttggtggtctatttcatattcatcacagtccaaaactgcgcgatgtacctgggattttggcaagaaaggcatcggaggcaagagcaacccagctggtggtcgggcaggcaagacgggtgtggtggctgaatggctaccgcggctcagggtcggtggtcaaccgacttgtacgcttgtcgcggcatctggatgtattaatcgttgcagattatgattatgaactgagcgggatgtgaatggatattgtctgaacaaataaaaaaagaaacgcaggcagcccacgggaaacgggttccggcatatgtatgggtgaccctcggggtgacgctgctaactttactgcttcatgccatcggcatgagtggtgatttggttaatgtagcgcttatatatctgtttcccgtcctggtgagtgccgtgtattggggaatggggccagctgtatatgccgcgagttttagcgtcattatgtttgacttcttttttgtcccgccatatttgagctttacggttgaggatttgagatatctcatctcctttgttgtatatcttgcggtggcgatcctgacagccagtcttgcaggtcgattgcgacaacagttagagatggtaaaagcacgcgaggccacgactaactccctgtacgcattgagtcgtcagatgacagctattacggatctgaatacattactggttaacattgcaacccaagtatcgcttaccctgggtaagccggcggctgtgtatcttccggatggacagggggatctgctggttacaagctcttccgcatccgaaggggagaaggatggctggggagatggggagtcggagattgccattgccaaatgggtgtatcatcacggacaggtcgcaggtaagggatcatccgctttacgggaatctctcgggctttacgtgccgctacgcacagaggagcagattcatggcgtgctcgccgtgagcatggacgctggtgaggttcatgagcagcaagaagagcttcgtctgttggaggcatgcggcggactggccgcaggtgccattgcccgagtgaagctggcggaagaggcaagattagcgcaaatcactgccgaatcagagcgcatacgcacagcgctgctggattctgtctctcatgaattgcgtacgcccctaaccgccattatcggctcggctacaggattgttggagaatgatacgctttttacacccgaggatcggagagaattaacaggcaacattcgggatggagccttacgcatgaatcgtctcgtcacgaatctgctgggtatggttcggctggagagcggcatgttgcaattgaaccggaaatggtgtgacgtggaagatataatcagcgttgtactgacacaagttcgggaattcagtccgcatcgtaacattcaagttgaacttcctgatgatccggtgttcatttatggagatgaagtattgctggagcaggtactggtcaatatcgtcagcaacgccatcaaatattcgcctgatgagagccagattgttatcacggtggcgagtgataagagcctaagtcaattgatgatctgggtagctgatcaaggcattggtataccggaatcggaaagaacacgtatatttgataagttctatcgctcggagtccactcagcatgtcacaggaacgggacttggtctggcaatctgcaaaggcattgtggaggtccacggaggtactattgtggcagagccgaatccgggcgggggaacgagaatgcgcatagatatccccatggaggctcacgaaccgcggtttacctattcagaacaaggagaggttgaagattaacatgaacgcaccactaggggctcgcatactggtgatcgatgatgagccgcagattcgtaaattgctcaaggtcacccttcaggcacaccaattcgaactccacgagtgtggggatggcgaagagggcgttattcaggccagtattgtacatccggatctgatcatccttgatcttggtctgccgggaatgtctggcatggaggtccttcgccggattcgcgaatggtcacaagtgccgattattgtgctgacagcgaaggatcaggagggagacaaaattgccgcgttggatggtggtgcagatgattatgtgaccaaaccatttggaatgggtgagttggtcgcccgtattcgggtggcgctgcgtcatgtagccaaaacgacggatgagccgatactacgcttcggatcactcacgattgatctggcccaaaggcaggtggaactggagagaactttggtcaaattaaccccaacggaatatgagatgctgaaggtgctcgcctcgaatgcggggaagatcatcacccagcgtcagcttttgcagcaagtatggggagggcatcatcatgagtctgacagccactatcttcgggtatatgtgggacatctgcgtaaaaaattaaatgaagattcaaccaatccccgatatattcagacggagcctggcattggttatcgctttttgcttcctgccgaataaggttcaagggagagcggggggtttcttatcaaatgatatgattacgcttcagtgggtgagcgctacggaacgaacaaaacaccgtcccttttagctacaaaggaaacggtgcttttatattatgacgtgtattttggcaaccagtcgccgtgagcctcaatcaactcatcacacatcgctacgatgtcatcgatagacagttccgcagccgtgtgtggatcaagcatggcggcgtgatagatatgttcttttttgccagtgattgccgcttcaattgttagcagttgcgtgttgatgtttgtccggttcagtgctgcgagttgtggaggcagatccccaatgtacgtagggctgattcctgatccatccaccagacaaggtacctcgacacatgcctcgcgcggcaggttcgtaatcaatccgttgttcatgacgttgccgccaatcttgtatgggttattcgtctccatcgcttcgataatatgcgatgcgtattcacggctgcgggtatgttcaatattttcgctggcaaacagcttggtacgcatttctttccagccttcaatctggttcacacagcggcggggatattcatccagtggaatattgaagcgttcaatcagctccggataattccgcttgatgaagtaagggtggtactcggcattatgctcagaggattccgttacataatagccaaaacgctccatcagctcaaaacgaaccatgtcgtcatgctgttccttctgtttttccttcgcccgacgtttaatctcggggtatagatcctgcccgtcttttgtaacttcgagcagccacgccatgtggttgatccctgcaatcttagccacaacacctgtctgatcgatccccagtgcatcaaacagatgtggtacacatacctgcacactatgacacaatcctacggttttgatcccgccatgcacattcatgacgttggtaagcacggccatcgggttggtgtagttcaggaaccatgcatccggacatacttcctgcatatctcgggcaaaatccagcatgactggaatcgtccgcaagttacggaaaattccgccgataccgagtgtatctgcaatcgtttgacgcagtccgtatttcttcggaatctcgaagtctgtaatggtacaaggatcatatccaccgacctggatggcgttgatgacatatttggctccgcgcagcgcttctttgcggtcatgatatacgttcacaacgcaacgacttccgagtgaacgggccagactggtcagcaaacgctctgaatcgctcaaacgttcagcatcgatatcaaacaatgctaattcaaaatcctgcagtgcttcggtcatcatgacatcacccaatacgtttttaacaaagacggtgcttcccgcaccgagaaacgtaattttattcatttaagtttagcctccctgaaaaatgttgtaccccaactataggccgattcggcacatataactatggctcaaaccctttcaaacatggcataatcccatttttgttcccgctttcaactaatatggaagcgctttagctgttataatataaaatattaaataaagaggtaagcggaacgaagtcaggatggagggcgaaaaatgagtcgcattgagatgaatgtggttcccgcaggctggacacagatggagctgatgttgttgtttttcgggtgggaggcctgtgatcctgcgcattattggggacccggtgtacgtgattcttacattgttcattacatccatgaaggacggggcaccgtgtacatgggagatcaggaatacaagcttagcgagggacagggttttgtcattctcccggacacacttattcattatgaggcggatccgaaggagccctggacgtattcgtggtttggttttaaaggcatacaagccaaagcattcatgcaacgtgcccaattgagcccggagcacccgatatataatgcccatgatacaaatacgatggaaaagttgtatacggagatggtccaggcttccacgcgtccgggaggcgatgtgatgaatcaaagtctcttgtaccgcttggtggcagaattaatctcttcttcgcctgtgaaggaagaaatagggcatctcctttcgaacaaagagacgtacatccggcaggcggtgcaatatatggagaacagatacagtcagcggacctccattctggatattgcccaagctgtggggctggatcgcacgtatctgtcgggattgttcaaagagcgatatggcatgtcgctacagtccttttttctggagtaccgcatgaattgggctgccgaacttcttcagaatccagggctgtcggtcagtgaagtggcccattctgtcggttatacagacccattactgttttccaagatgttcaagcgagtgacgggtgtgtctccaaagggttcgagaaatccagattagacgtatttagtgtttcaaatttgaaagaaaagttttgatcattaaatgttgtcccgcgttactgatacagaagtgtaattgaatatgtggaacttggtgctttgcccgtcaaggtggaagcttaatagggaagtctggtgtgataccggcgcggtcccgccactgtaacagaggagtcaagtagcgataatccactggtttaagccgggaaggagctgcaagtgacgatgattccggagccaggagacctgccaggtttaagaaacacagtagtaccctacgggagataggaagttgtttagagagcatgattttttctgaaaatctgtttatttaaggcgttctcattcactaacacggagaaggacgctttttttgatagaatttataagatttcagcggagctgtggacggagaacatcatggcacatacattaagttgtggggaaggacgttagagcacttgagcagatatatcgttaaacgattattacaactagtagtcgtattgctcggcatcacgttcctgctaacctacctgtctcctggagaaagtctgtcaggataatactgatttgcgggttttctttatagtctaagtaaggttataaaaagagaataatgcaagaagggttaccccagaagtccatagatgactctcaggataacccttttgttgtataacaggcatgttgtgtgtagttggaacgtgatacagcaatagcttgtgaatgcttcatcttatgtcgtgcagttcacctatgtcattgagtacaccgtagttttgtgaaggctgcatagtattttatctgcccctcaagtctatttcatcatatatttattgattgcttcattgggtgattgtcggtatacagatattcagtcttattttggagaggcactccgcatatagactcttctgtccacatgtagttggctacatatgcttagccagtcgtgctgacatgagagattcaaactagtgcggtacttgggattggaagtcattccggctggactgatcagcatggtaaaagacaatatcgccatccttcagaggccaggttctgcctcgagtgtctgttggttttttgttgaaaccttccatctgccattgattcatcagtggtgcatgaatgtattgcagatggggcgcctctgtatttccattccgcaggctctccatgttgaagttgactacgatataaccattctttagaaaaatcttcgatttctcatccagctgattttgtcgggcgaggggttcgagatccgtcccttttggtacggcatatacatcgaccggcaagctgtactccccgtaccaacgctggattgctgcattggctcggtccgcgttgaccccggaaggaatgtccgttttaggtccaatgagtgtcctaatcggagcggaaaggatcatccaatcataacgacctacccatgttttttgatgagaagtctgatcgaccaggcgtaccatatgttctgccaacgtacgctggctgcgttcttccgctgtcagttcataagtatactgataacgtgctgtatcacctaactctgtgccgggtacatttcgaagccgtgagttcagcacaacaaagcgtttctccatatcctgtgccgatccgatacggattaggcgttcctggcctcgatggtagtacagatccacttcttggcgggaggacccgtctttactcacaaaagcaaaagtgggtgtaattcgaataccatcctgtttgccaaacatattgcccttggtcttcagatcaaacttgaaatggtatcctgtcttcacagtcgcgttagcaaatccctgtaccgggtggcttcccggtcgaatgggcaatacaaatggagccaggttacctcgcggatcaccatcaatgctattcatcccggtccagtagctatagcccgttggttcggggctacccaaccgcttgcgaaatacactttcccagttgtaatcagagatatcagtgacgtgaaaatcatataaccttccgataacatctaccggtacggtgtctgctgcaacatgatgtgccagattggtattggcatcctgttgttcggtaaagtttgcaggtgcattctctgcaatattgcggaatacaatatggtatttgccttcgtctacccatacagggagatagaatgtggtgtccagttgattgaccggaatatccacccatgttttggcagggaaaaactgactccgatctgcgttatagacatcaaatgggaattgcacctgtttgattcgaaaatatttggcatagtcccgatttccataaccgggataactcgctgcgtccaagtgctgtcccgatgtgggaattcgcacaatgaacggacgttccagaatgagtgcagcactggttgggtctggtacggttttctgattatgcggctgatcatccgatacccaggcgtagttgacgacaggggtgtgtacggtgaccgtgttgatgccgttaatcggtaatattttattggcaccgccattcacgttacccggtagcaaatcataatagatctcaccagagcttgtggtgtttgctttattcagcagggaattgctgatcatattacccggtttgtacagcacatcacgcccaatcatcgttggattaggaatattggatggcgttgggccatctttggttgcttccacatcattcataatggttgtgttgttgaatttcactagatcattattcactttactttgaggtgtgttggactcagccatcccttttaaccgtgatgtatcatctggcacactgggaggttggttcaaaccacctgttaatttgggtggagtatatgagattgaagtggtttgccctggtcgtacatggctttctacggattcatcatttttagactccagtgttggtggtgtgtatcctgttggattcatcgtaacggtctcaccgggcaaagcgtaattattcatggttgctttagcgatcttgtatacttccagattgttaattttccagtaggagtagtctcttgtgatctggaagttgtatggcttgggtaccgtgtcgttcgcgggtacaggtggccctggtgtacaaccatcatcatcacattcctctggtccaggtactgtccactctctgtcgtacgagattgtgacattacagttgtatgtaactttaccgctcattttcgcccaagcttgtttaaataggtaattgtcagcaaaggcatttgtgtagagtgactcggaagtagggattcctcttaacacattgaatgtctcattatctctgttatctgacttgataacaccgttggtatttggatcgagatcattcatgctcatgatggttccagcagaaggtggtccaatcgttggtgtgcaacctccaccgcctccgttaccgtcgccttcgccagtacctgggctctcttcaacaccaatgtttgttgtggtagttagctcaaaatcatccttttcccacaatacggtaatggttgtggttcctctgctgacggcttgaactactccggagttactaacggtagcaacaccaggattggatgattcccatgtcgttgtaccaccgctaccggtgtttacattggtctccgctccaaagtttccatctccagttttcgtcttgaccgtagcattaagttgtttggactggttcaagctaatttgtccaccagcggttaggttgatctctttggttatttcggcaaaggcccgccaatatatatccgtattgaatatgtagtcggcagagaatttaggtggattatagggtctgtgggctgttggttcaatcgcacctccgatttgagttgtaaatttcaccgtatcaccgtcaaatgattccacactaaccaagattggttttcctggtaagtaatattgtgtgttatccatgtacatgggctttaacgaaattgtagttaattcacttctagaatacctctgaccggaacgatcaaagtactcagagggtttgtagcttggtgcatccagtgaaagatttacgcaaactaatgatgagtttggtttgttagtatcggggttattgcttaatgtttggccgttgcattctccatctacacgccatcttaaattatcgagctggtaaacataaacaccgatattagacattccactgccctcaacggggattacttttttctgagactttgcaggtgatggaggtactatatgagaggcttctaacactggctttgttccaggcccccctccagcaaaaacaactgaaggggttgggaacaatatacacaatgttatatatgctattaataatttttttaatgatttatagaactgcacattggaacacccttttcatagtttaatttggaactacagtatagtttgttccatctttgagcgtcaggcgtactccaggatttagtgacttatcaaaatgtaagagaccatggccccagtaaacagggttctttacgataaacacgcctttgggtccgagtaaatcatttatatgtttaggtccgtactcgctaaaagctttggtgcttggtgaagttagagcattaatagttggggaatggataagactaccggcttgcagttgattcatagagttcttaatactaatatcaaactctgtgaaagaataataagcgcctcttagtaatctatctttttcatcaacgaaaacaggataatagatacttctctcagtttcttttacatatggattgacgatgatccagttcttgatcttcagatctgcataattcgttactgtaactaattcttgattacgaactttcccaaaatctccagttactttgctgtaatcatacgattcagaaaatttttctggtcctgctttctgatacttaggcgcaataatattcaaattcgtccccgtcaaacccaccgcccgcagctcattcagaccctgaaaatcggcaggttttgccttggcaactgttgcataacgggcaatcaacacagcaacttccgctcgtgttgtagtacgatcaacgccaaatgttttatcgtttgccacactcataagtcctgttcccagggcaacggctactgcatttttttgagcgcttgcgagtttacctgtgaaatattcctttgcgggcacaacggtgttggttacatcagagagtgcttgtttgtactcaggatcaaccacggttagcccttgcgttagccaagtagccatttcgcctcgttgaagagcgccttgtgcatccaattttcccttgtaattagaagggttgataaaaccttttgcgatagcaattgagacaccactttttgcccactcggggatgtccgtgaaattgttttgttcttgtgttgatgcattaggctgttcggatagacgtcccaagatacttgccatttcagctttggtgacaggtgagcttggtttaaatgttccgtcagcataccctttgaaatacccttgttccacggctgaattaatcgctgcggatgcccagtgtgtagaaggaacgtccttgaatgtagttgtagcttgtgcggcttctacagaactccaaacgcctccaaaacctacgataccccctgttaataaagctaatgccgtgacgccggaaattatcatttttctcatgaattttactcctctcaattgtgaatttttctccttgatatgtacttttcaggctactagatactaaatttgtaataataatcaatattctaccatgtaaaactaggctgttggtatgatttatcaatatatttcctcctctgcatagaactcttactacttctccagacctatatttcctccaaaaaacacaaaaaaaggccacgaatccgcagattcacagccttatgctttaaggtctccaacatatgtagttgcatcaatagtcaattcaataatcaatacaccaaggatactcgatttccaaacatttgaaaagccctattcttcttacttaaaataaagtcaggctatcggtgttccattaggtaatggactatccggtgtgagcaagacaacatcgccttcaccaggcacgccgcctagcacaagtacttcagagacaaaaccggcaatacgccggggtgggaaattaactacagcaatgacctgtttgccgatcattatgtcaggcgtgtagcgttgggtgatctgagcactggaacgtttcaggccaagtggtccgaagtcgatcgtcattttaatagcgggaatgcgagccttggggaagggttcggcctccaccacggtaccaacccggatgtcatgctgcatgaactcttcaaaagtagccataggggtaaatctcctttcaactattggggactattataaatgaaaaatcaacaaaaaatccagattacactgtatcgtaacctggatttctgttgtgttgctttgaaacaaattaagcgccgttccaattctctccggtgaggtatttctcggtgaggatggataacatctgaatacctacttcattatgtccgccttctggaataatgatatcggcatactttttggatggctcgataaaagcatcgtgcattggttttaccgtttcgagatattgtttgtacacggattggatcgtgcgtccgcgttcttcaatgtcccgcagtactctccgcaaaatccgcacatcggaatcggtatcaacgaatactttgatgtccatcagactgcgaagatgttcgtcaatcagcacatgtaatccttctacaatgacaatatggttcggtgccagttcaaccgtctcattggcagcacggttatctatggtgaagtcatatacgggagcatacgccgcttggcctttttttaacagggtgagatgctcaatcaacagatcattatcgaatgcaaacgggtgatcgtaattggtgagtcggcgttgctcaggtgtgagctgcgactggtctttgtaataattgtcttgggagataaacgtaactttagctgatcccagacggtctatgacggagcgagctaccgtcgttttaccggagccggttcctccggcgataccaataatgagcatggttgttccataagcctccctaaaatggcagcatgatgaatggataaaagcgcatcagaaatccttcgttcatggcctttatccacatgtctgtctctgaatacacaattccttcattgtaccatagcactcgacttttttcatcttggtgtatggaccatgttttgccttcaaggggcgttatgcatgctcatattcattttactgcatatttttggatgatactccctgtggtgactcccatagtgccattagtcgctggccgatggaacttttggtgaacagattcaggatgataaaaccaagtacacttcctgttgtattggctattatatcgttcagatcagtactgcgaccgttgcctaaggttactcggagcagcaactgtgttatttcaatgaggaaacttacggtcaatcctgctaatgctgctgtttgtatcgaatgaatccaaggctttatgaaaggaagcatgaaccccagtggcataaacagcacaatgttgaggagaaagcttggtgcatccgctgtcagaagcggaatccattgaatgctttgataccatggggtctgattggcataaattccgatgttcacgtcgatagggaaaaatacaaagtgcataacgcccaacatatatatggcaaatgcgagcatcgacacatactgcctaaccgtgtacctggttttgctcaccctggcatggagcatgagggcgagcaggaccagaacgaataacggaccaagtacgatgagagatgagattgaatattggatggacatggaatggctccttcacaaggaaatgagatcaggctattgaagctgaatcttcatttccattcccttgatgaattgattatctttaacctcttcagcgaagtcatccttgatctcaaaaggtttcactatcaggtatttcacatctttggaagtcgtagcatacatgcgctcggatgttatttggtttccctcatagatgccctcgccgctaagtgaggtcagttgccgcccttgatcatcatagaccgcaaatccgatgtgactcagctgttcctgctcttttgccgtaagagtattcttatcattcaaactgataacagtagttaggcgagtggtgacaggggtaacctcagcttccgtaacagcggccgtatacagatcgttggtcatggctgtgttaggcagaacccgatgaatgttatctgttgatttggtaaatggaaccgtcagctcgaactcatgatcaataccctgcaatgtcaattgaactttggcgtcaaactgatccggccaatgtgccgttccctgatcggaggaaatgacctgctcaaagagcagtgtatctggctgcgtttctcctaccgaactatagaacagtccactattcggacgggtcccgtcgactttgaaaaagacattctcaattccgctgctcagtttcacgatgtccttgccattgtcatattcgccatgattcagattaggcgcagtgaaatgaaccagaaacgcagcacgtgtaccatcatataccgcttcaagcacttcgagtttcacatcctggtaagcgaccttgctgttaacaggggtagtcaagccttcgttgcccgccgttcgcagacccatatcagcttctatcgagctgaagaggctgcccacgagtggaatattgcgcaaggaggcagccatggccggtgatacaaagccggatgcaaatacggtcacgcccaacactccggctgcgatcgtcgcagctgcagccttgtgccatcgcttgttccggcgactggagcgcaaagtctgttccgttttcaatgtgtctggcgacaccggcagagattccagtgtggcatcaatccggttacgaacgagttcagacatcaggggacgctccttcgcttggttctttaattcctgatcgatattaaacgggtttgacatgtaagtttacctcccgaaaatttttgaatttctgatataactcctgccttgcccgagtaagtctcattttcactgcactttcggaaatattgagagcatcggcgacttgacgcagggacaggtcctcaaaataatgcaaaacgacaacaattcgtttcgattcctctagacggtctaccgcttctcgcatatcgacctcatcgtagggactggaatgctcccgcttttctgaaggtacttccgcataagcggtggagagagagcggcgggacagcatcgtgttacattcattgatgaggatgcgaaacagccaggttttgaaataccggggttcccggagtgtatgcaccgatttgtatgcgttcaggattgtctcctgaatggcatcggccacgtcctcctcttttcgcagcatggattttgccgtattgtacaaagagttttcaatgtctcgaataagccggataaaggcttcacgatctccttggatggcctggttaacgagatcggttgaacccatggataacagctcctttcgtattggagggatgaagccagcacttggctggtttttatatgaattagactggcgagtagggtatatggtcacattttctttttatagttttaaaaaagggcgttgttatatctgacgtatcgggtctctgcgttcccttcaatgataagagaggttgatttttccctaagattggatgattgacttttttaaaaacagcactataataaacttatattcataacacggactgttactggggaaaccaggcatgaccgaattcgattgctttactgtaatcgctttcggtctttttttatttttgttggggggtgagaacattgaaggttatcaagaaagtaaacaataacgtagccatcgctattaatgaacataacgaagaggtttttgtcgtaggcaagggtgtaggatttcttaaaacgccctatgagctgacggagacggacttggtggagaaaatatttgtagcaccaaagaacatccgtatgtatgacctgctgaacagtattccgattgaggatatttatctcgcggaggaagtcatcaagctgggcagtcagatcctgaataaaacatttaacccgaatctgcttctcaccctgtccgaccatatcagttttgctttaacccgaaccagagaaggtatccgtatcaaaaatccgctggaatgggaagtgcggacactctatccggacgagacccgggtgggggaggctgcgctgaggctgattcaggaaaaaacggatatcgctctgccaacagccgaaacaacactgattgctctgcattttgttaatgcacaggtgggctctggagagatgacggataccacgaaggtaaccacagttacgggcgagatcctgtccgtgatcaaatatgcgctcaaaattgactttcaggaggattccatccatttcatgcgttttgccacacatatccgatatttcattctgaggcagatgagcggtaaatcgctcaaagacgagaatgaatctctgttcctgatggtgaaggagaagtttccgaaagaactcgcttgtgtggagaagattgctgatttcctgaaaaataattatggctggacctgttccgatgatgaaaaattatacttgattctgcatatccaacgattgatttcgaatgaaccaacggaatgaactagtgaaggaactaaccgaataatccatattggactgttactgattcgatcaggcatgaccaagcgtagggaatgacgattccccggcttggtcattttttatatatccaatttattcatgtagaggagaagggtcatgaacaacaaagacttggctaaaaacgtacttgatctcgttggcggcgagcaaaatatatcgggtctgacacactgtgcaacccgtttgagattcgtattgaaggatgataacaaagcagacctcaaggcgctggatcagctcgaaggcgtgctcaaggcacaaaattccggtggacaggttcaggttgttatcggtgccaaagtagacgcggtatacagtgaagtgaagaatctaacttctgacaagattggcgagcttacggagtctacagacagtgggccgaaaaagagacgtaaccccgtcaatgtagtgcttgaaaccatcgcaggtatattcacgcctgttctgccagcacttgttggttgcgggatgatcaaatgtttggctaccgttataactgccatgggttacctagaaggctccggtttcctaacaatcattaacatgatcggggactgcattttctacttcatgccgttcttcctggctgtcagtgcagcaaaccgtttcaaaactaatccctatttggcggtagctcttgctgcgggactaatgcatccaaccattttgaacgctgcggctcagattgctgagacgggtgtaaatagtattgattttctcggcatgccgattctgttgatgaaatattcctcttccgtcattccaatcattttggcggtatggattatgagttatgtgtatccgatcgtcaatcgagtgattcccaagtttctacaggtcctgcttaccccaatgattgttttgttcattatgattccagtggaactgatcgtgcttggcccagtaggttcatatatcggtgactggttgacgaatggcattaactcattgttctccactgcaggtgttcttgctggtgcgattcttggatttttcaaaccgatcatggttatgttcggtatgcactatgccatcatgcctattcaggttcaacaagtggctacactgggcgcaaccgtgttgttaccaacggcactagcggcgaatttggctcaggctggagcagccttcggtgtgtttgtcctaacgaagagtaaaacgatgaaatcagcggctgcttcgagtggattcaccgctttattcgggattaccgagccggcgatctatggtgtaacgctgaaatacaaacgtccatttttcgcaggttgcctggcaggtggattagtcggtggattctacagcttggtgcatacaacagcgaatgcaatttcactgccaggtgtattggccattggcacgtatacatctgatcgttacatgtatgtcgttattggttgtgttgccgcagttgtactcgggtttgtgttcacgctgttggctggcatcaaggaagatactgaaggaagtaaatcgaagcagcaagctacgaataaagtaaatagcaatcagacagtcgttgccacagaggtaactccagcatccgtatcatcactgacaaccacatcttctgacatgcttatcgttagtccaatgacaggagagatcaagccgatctctgaggtagaagatcaggcatttgcacaagagttaatgggtaaaggcattgcaatcgttccgacagatggcaaggtatatgctccatttgacggggtagtcgaagcactttatcgcaccaagcatgccatcggattgaaagctgcgaatggtgtcgagatcctgattcatatcggagtggataccgtcagtctgaaagggaaatattttaacgcccatatcgaacagggacagacaatcaaggcaggggatttattggttgattttgatccgaagggcattatgtcagcaggttataacaccattacatcgattgtggtaaccaacatgcaacagtatggagacgtactgaccacagcgaccagcggaccgatccgggagagtgaacctttgatcaagctgattccgtaaaacttgtaataagactctaataacacgtaataacaggaggaaactaaaatgacgaaatccaattttccaaaagattttttatggggcggtgcactgtctgcctgtcaggccgagggagcttataatgtggacggcaagagtctgaccatccctgaagtgatgaaatttaacgagaagaacgaccgcaaagtgaccaagcagatcagagtgaattgggagatgattgaagaggccaggaatgaccaggataccgtgaaatatccgaagcgccgggggattgatttttatcataacttccgtgaggatatcgccttgtttgccgagatgggcttcaaagtattccgttattccatttcatgggccagagtatttccgggtggcgacaatgccgctccgaatgaaaaggcattagagttctatgatcaggttattgatgaatgtcttaaacacggtatggagcccctgatcactatcagtcactttgatacaccaattgtactgatggacaagttcggaggatggtataaccgcaagctgatcgatctgtatgtgaactattgtgatgtgttgttcaatcgctacaagggcaaagtgaaatattgggtgacattcaacgagatcaacatgagcgtgaaagcatcggccaaaacgctgggaatcattgattatgatgctccaaattatgaagaaatgctgttccaggggctacatcatcaatttgtagctgcgtccagagcaaccaagatggcacatgagattgatccgaataaccagatcggaagtatggtggcttattttacaacgtatccttacacttgcaagccggaggacgcactccagatgcaacaggatgatcagatgaaaaatcagttctatctcgatgtgctcaataaaggcgagtacccttactatagtaaaacgtatttcaaaaacaaggagatccagctgaatatcgaggacggcgatctggatagcattagtgcacacacggctgatttcgtggggatgtcgtattacaactcgatgatttccagcagtgatacggagcagctcgaactaacggcaggtaatgtacacagcgtatataaaaacccgcatctgcccgctaacgagtgggggtggcagattgatccgattggcctgcggtatacgcttaatctcgtctatgatcggtatcaaaaacctgtcttcattctggagaatagctcaggtttctacgataaattaaatgaagacggaacgatcaacgatccttaccggattgatttcctgagcaaacatatcgaacagatgggactcgccattgcagatggagtcgaagtgttaggttacacaatgtgggggccgatcgacatgatcagttcagggacttccgagatgagcaaacgttacggatttatctacgtggatcaggacgactatggcaatggtacgctgaaaagatatcggaaggattcgttcttctggtatcagaatctgatccgtaccaacggagcagaactgtaacgcaccatgaacattttgggtcgtatccaaaaaatacccggcggcttgctgattgttcctatgctggccgccgcggtcatcaacacggtgtttccatcattttttcagatcggagatccaacaacagcgctgttcacatcgaaaggtaccatggtgctgatcggtatgattttactgatatcaggaacacagcttaacttgtcacagcttctggtgaccttgaagagagcaggggtgctctgtatttcacgcatcctcatcagctgcctgttcggatgggcgtttgtacacttttttggcataagtggggtcgggggagtgtctgcggtagccttcattgccgttctgaccagttgtaatccaggattatatctggccttgatgaacacatatggagatgatgtggatcgggctgcgtttggcattctgaatctgatcgccgtaccggttattccggtcatgatattgaattcggcaagcggtgtcggtatcgattatctcagtgtacttgctacactagtaccttttttgatcgggatactgcttggtaacctggatagcaacatacaaaagatgtttgctccgggaacactgattctgctaccttttctaggtacaagctttgggtccaatattgatctgcgtattgcatttcagtccagtctgtccggcttgctggtcaccgtgttatttttgctgatctgcatgttgccgctcattggaatcgatcgcacgatattaagacggcccggttacgcagcggctgcgacatgttcggttgctggattatccatggtggtgccttcgatggctgccgggttcaatccggcgtatgcaccatatgtagacacagctatcgctcagattgcgtttgccgtgatcctgacgtcggtgaccgtgccttacatcgtgaagcgtttggctggaggaacagcaacggaagcttctgcttcgacaaatcactagaaaaaaacagcatgtgttctgtcagattatgacggatcacgtgctgttttgctttgtacatctatatgatctcctgggggaggagagggatcgatcggtttattttacagacccagcagttgtttaacactttcagctacagctttgctcgattgcggattctgtccagtgaccacgcggccatctgttgtgacataggaactgaaggcagcagctttatcatattgtgcagcgcgttctctcaaagcatcttccagcaggaaaggaacatactcggtttgttgagccaatgtttcttcttcattcgtgaagccggaaacggttttgtcgttgatcaaaagcaagccgttggacagcttcacattcaacagggctgtaactccgtggcacacgccggatacaacgccacccttttcatagatttcacgagaaagctcttgaagttcagcattatccgggaaatcccacatcgtaccgtgaccgcctgtgaagtagattgcatcgtagtcacttgcattcacttcgccaggtttcaacgtatttttcaattggttcatgaacgtttcgttctcgaaataggttttggtgctttcatccagagagtcgccaagacttttcggatcaagaggtacgttcccacctttagggctaaccagatcgatctgaacattgtcattatggtcaaactcttcaataaagtgagttgcttcgctcagccacaagccagtaggctcgtcctttgttgcgtacttatctacatttgttagaacaaccagtatctttttcatattaaaacctcccgtaaaatatataacataaatttataataaatatcacaaaattaaattgtgtaaaatatattattaaatataacataaccattttctaaagtaaaatcatgaacgtatcgtcgatctccaatgtgactttcaagcgtaggagtaaagaacaatctagtcgtagtaaatatgcctgtaagaatacacttttacttattatgcccagcttaatttactcaaattgtaagcggaggtaggcgtgtgtaaggggaaacgaaattaattcaaatttgaagttaatttgattgtacaactagttcttttgatttagaatggcggaagatgccaacaaaaaactggtacaaattacatatatacttggaggaacattcatgaaacgttcaggcaaatttttcgcttcaacagtggttgctgctgttgctgcagtatccatcgtctcttcagcttcagcgagcacagtttcagtctccaacatctctggcgtaacacctatcaacattagcagtatggatatcgaaacggctttgatgatggttcagagcgaacgcgccaaattgctggatgcgcaattgcaaacgcaaatccaggaagtacagaaccgtaatcaacagatcgcggagttgaactctcaattgcaggtagcccagcaaaacggggatgaagtagctgttcaaaagctgaaaggccaaattgatgcagcgggcaattcccaacagatggacatgcttcgtctgcagtccatgtccaacaagcgcaatgaagcgtttgatgtcatgacaaactttgtcaaaaaaatgcaggattcaagatcatccatcatcggtaacatgcgttaagaacggatgattaactgctacaacaatacaaaaagagcgaagtcggaattcaaattccgaaacttcgctctttttgtgtttctctttttttgatatatatcatctaatccaagttagcccgaccagtcacgacgccgagtgaacagatcctgcaactcgtccgtcgacaattcggtaatccagttctcagagcttgtgatgatgttatcgctgagctgctgtttgctctccaacatctcgtcgatccgctcctctaatgtgccaagagagatgaacttatgcacctgaacatctttggtctgacccatccgataagctctgtcggtggcttgattctcaacagcagggttccaccagcggtcaaaatgaaagacatgattggcagccgtcagattcaatcccacgccgcctgccttgatggacagaatgaagacggacggttgcttatcctcaggcaatgtacgggattggaattcctcaatcatacgatcccgtgccgttttggaggtacccccgtgcagatacagcacaggctcctgcaactcctgacgcagtacctgttgcagcatctgtcccataccgatgtattgggtgaaaatcaggcatcgctcgccttcgtcccgcaattcccggacaagttccatcagtcgttccagttttgcggagcgactaatcagcatcgccatatcttgcggactgtacacgtcataagcagatgttaatgcgccgtcttcaggcagttcctcaggcaaagcctctttggtcaacagcagagggtggtcacacagttgcttgagctgggttaacgccgatagaatggcacctttgcgcttgatgccttccagctctttcattttatccatcagggcctgtacggactggtcatacaatgcactttgttcgcccgtaaggtgaatataggttctcatctcgtttttgtccggcagatcaagctggatattgggatcttttttcttacggcgtagcatgaatggtttcaccaattgctgtagatcctgcatgcgctgctcatctttatctttttcaatggcactgatgaagcgagtctggaatgcccgggcgttgcccagatatcctggattgataaagtcatagatcgaccacagctcggacaacctattctcgatcggcgtacctgtcatggcaatgcggtgtttcgcagggaagctgcggacagccagcgactgtttggtctgagcattcttgatattctgtgcttcatcgagacagatgcatgaccacgtataggtttgtaacatctcctgatccagtgtagccgtagcaaaggacgtgataataatatccacctgctcggtctgatcccggaattcttctccacttaatcggcgtgcgccataatgcagactgacattaatggagggtgcgaagcggctaatttccttttgccagttgcccagtacggaggttgggcagatcagaagaaccggggcttgtcccggcttacgtggttcatgatccttgatgtgtaacagatacgtgatgaactgaatggttttcccgagacccatatcatcggcaagacatgccccaagtccgaatctgcgcaggaaaccaagccatgcaaaaccttccttctgatacgatcgcagctcggcatgaagccctgtcggaatgggcagggaaggtgcgccgccttgtccgcccccgagttgtgcaataacccggttcaggtgctcattcagttctacttccagccgaatgttttgatcatcctgtggttgctggtcttcctcggtttgttgtccttccttccatttctggttgcgatattctcgttgctcattatgcagcagatgcaggtgcagaatatcctggaatgagagtccctgttcccgatctacaccgcccatggcacgacgtatctgttccagcaggtcggggtcgagaggaacccattctccacggaagcgaaccagtcgttcattacgggcaacaaggtcggcgaattcatcttcgctaagatccgtgtcaccaatcgcaatgcgccagtcaaaatgaataatcgagtccagtccaaagaacgactgtccccgttcactgccttcctccggctgcaccttagcacgcagctttggtttcttcttacgggctgcttcccaccaaccaggcagcagaacttgccagcccgctgcgagcaacctgccgctatcctgcgtcaggaactgccaggcttcctgatctcccaaaggatcactcagcacatcccgcctaccactaatggagcttccaagacgcggcagatgtgcacgcaactgatccagccatccggcggagcgatccagaatgaacggtgtccatacctctggccattcgccttcaagtctgccccgtgaatccagcatgacgggcaccaatacagcggcatccagcttgttctgcaacaccaatcgcagccgccaagatggctcatcctcgtccggctcctgcaattgcagcatgggtctgaatggtgcggcatctgctttccagccaatggatacgagccaggactgagcatccatcccggctgtcttgggtagagtgccgcgctctgggaacaactgcgggaattcacgccgcagatccgttgcagcttcttccgaactgtaccagcgctggaatacaaaggcggaataggccgccccaagtccttcggcataactctcgtccgtttgctgaatcgctttggtgagcgatgcccgatcctgctttttcaagctatccgggtcccaggtccactgaagctgtcctgcacggtatgcctcgaagctaggtacgtattttcgtttctctatggaggatgccagtgctggagctagtcgaatcagatgttccgcttgttcgtcccacttccattcaatatgaagcagcgtatgcatctcggcaaaaaagggaatcacttcttccgcaggcagaacaaccagctcaatctcctcaatctgccgaacttccagttcggtcccgtagaaggaaggcgcatgccaagcgaacaatcgctgcttaagcgactgtcccggtacaaagtggtgtgtgttgagtgctccgtaaaacaaagcatcgccatatccggttaaagcgacgtgaacctcaatcgtttcagtgtaaggatgaattaagctcatgagatcagtttacctttccgaagctcttcctgcagggcgcgcagccgactgttacgaacggcgagtgtggtgatgaattgctcccagtgcgcttcttgcttcatttttttatagattttggacagacgtttcaacagcttcaccgctgctttgtatccgtccctgtttttgtgtccgatataacgctccactgcctgatgatagaagggaagcagcagctcaggtgcatctttttcgattggttgcagcatcgctacgcggaattccagaggttccgttcccgtactcagctgaaaatcaatccatctgcgccactgtccacgcgaatgcatagcatcctcgtaggcggggcgggagtggggaagcatactgacaagcgtgtcccacatacggttctctgcatcgggcagatgttgaatggccgtatcccatagatgcatgtaatcattcaaaggtgtattacgccgattcgccagaagggggccaagttgtaccaaccaatccccaagtcgcttccattcagccgaatctgcgagtacatggagaaaatgcaacagttgttctggcgggaagccgtaggccgagcttccatggatgagtcgctgccatgcctgatcatcctgccccagatggaagtgcatccagctctgcgcgagtactagcggcagaggcagtgttacggctttgcctggtctatcactactacttccattattttgagcgctactcaagacacttccacctgactgggaaggtgtcgaagcggcggttatattgcgctctatatcatttaagatagcctgttccgacactaacatgtcccgcgacccttgaagctcaggtacgatccagttcaaccacagttgtcgatagatcggagtgaagaacatcatgctggctgtctcaggcatcatctgtttacgtaaataagctgaggtttcggccagtctgctccaaagttgttcaagcttgtttccctttagacctgacaggtctagtggatggttaaagatccgttcaatgtctttctgaagtgcatccaccgcgagctgggcagggtaactcaaatacacgggggtatgcgtgattgagttacgagccggcggcacgcagaatcggatgaggtgcagctgcacatgtagttcaaaaagttggtccattgcagcggacagccttggtttaatggcatacagctcgtccgttgcttcctgtacgtaggatgtgcttgctgtgccagtacgcagccgtctcagacatgagtggaatagttcgtgccattccgagatttcgagatcagcaagctctgttgcacgttccttgatctggctgtattggttgtctggaatatccatatcctgttgttcatcggtatctgcgtagctggatagtcccgcggacatggccccgacgggtttggtcgtttgtttgagtgcagtactggagtgcgcattcacaatcgcatgcacaggtcgctccagttgctcggcataactcattaatacagccgtcatatgtttgcatacggaactcaccgggcaggtacaatgacttgtagtcagggattgcatgcttagtgtgacctcgtactcttccgatccttgtacaacggccgagatcccttgttgttcggaataggttaatggtccgacacgtttctgtttataatattggaatccgcgcatgatcgtcaggttattaaaatgctctgcaacctgcctgatcaactgttgccactgcgcatcatccatcctcatgttatttggtatgttcatcattccatctcctggggtaaacataggttcggtaatcaccacgtctatgacatgatgctgtaaatttgttgtatccatcatatcagttatgagccaatccgtgcatgggttatgaagaatttgaagttattttagaccaactggaatcaggatgaacacgtcggttctgctggcggacggaatgcatgattgcaccatattgtgtatgcttatggtatgtattcctttcaggaacgatgcaggccggggaaacggccatattacacacaacaggagagagcatatgaaaatacttacgttaaacacacacgcttgggcggaagaggatcaactgaacaagatcagtcagctggctgattttattaatacacatcaattcgatgtgatctccatgcaggaggtcaaccaatcgatgcaggaagtcgcgctttctgaagaagaactgaagatgtattatgctactgaacccgatgcagtgattaaaaaagacaactatgcctacgtcctgcttcagcagctgacagaacaatattactggacgtggattcccgcgcatgtcgggttccaaaaatacgatgaaggactggcgatccttagccggacgccgattaagcaggcttttggggaatacgtgtcccacatgcgagattataacaactatcgtacacgcaagattgcgggaattcagacagtcgtccaaggtgaagcaacctggtttgtgaacggacattataactggtgggatgatgcgcaggaacctttcaagggacagtgggagttgacggagagcaagcttgccccctacatggaccagccgttatatataatgggtgatttcaataatgtcgcggaagtgcgtggtgaaggctatgattatatgatgaataaaggctggaatgacctgtacaccacagcattgcaaaaggatgaaggagcaaccgtggtgaaggccattgccggctgggcagataacaaacgcgatcttcggatcgactatattttctccaatcgtccgattcaggctaaatcttctaccgtggtcttgaacggtaaaaacggaccggtagtatctgaccattttggcgtcgctgtagagatataacagccgtgtgagcataaaccgtaaaggtgatatcaccgcaagtacgaaacaaagcctccgctgacttcctgtaaagggaagtcagcggaggcttttcacattctaaatcatttgttatgtacatttaatatcgtttgttctttctgttgtggaactctattgttattcgagcgccagcatctgatgtacgaactttttcagattcgcgcttgtctcactaagctgttcgatactttccatgaactcggtaacaagcttggcctgatccaccgttgctgttgtaatctgaccgatctcttgttccatatgcttcatggaatcttgtacgctgcctagggacgattcaatatcagctgctgcttgtttcgtatgatccgacagcttgcgtacttcactggcaaccacaccgaagccggctccctgatcacccacacgagctgcctctatcatggcgtttagtccaagcaggttggtttgttccgatacttcacgaatgacgtttgttactttacttacactgaccgagttctctgaagcttttttggaattgcgcagaatctcttccgaggtcgcagagagttcttcggaatgtgcagcaatctgctgaatgccgccgacgagcgcattaatggttgtttcgttttcacggatcagcgtttccagtgtcatgtgactatccagtgcgtagttcacacccaatatacccacgacctgatcgttctctttaatagggattagaatggcatcaaaaggtctgccctgcagatcaccaggcatgcgtgccacggtacgggaatctctgttagtcagcattttgaaatgtttataatcatcatgcagctcatccccaacctttacgccaatctccagactttttgcttcggaaaaatacaatactttctcatgatcattaatggatatggatatgtcgtcacggaacatttggctaacaaaaggcatagcatttaccagagattcaagagtattcaatgtgcatctttccttcccgatacaaaaagtggaatttttcaatctagtatttatatcggtaacgttttcttgtttttaaaccattgtttaaatttaagttaacctagagagaaaaggcgactaaatccgatataattgtaagcgtaatcaaaaatctgtagccaccaccgaacatgtcagttatactgggattattattcggctattcagaagataaccaagggacatacctacttcccggtaaggggattacccacctaggttaagcgctatactttattactgcatattagtttggtgctccagtgtggatggtatgaatgccatgatataagactttatttcaacgggagaaggatgtgtgccatcgatgacgacctatttcagtgaaccacagagcatgtattaccgatttggagaagatcaggatcaggtgctgaaggtactggccgagaggtatattggagccaatgcacaggctgattttgtatatcgggtattccaaaagtctggtattttgcaaaatgaaaaagggctttatgatctgaatttaggtaaacgctttcctgatgcgcctaaagaccatatatcctacgcagctgcattggtttggggggacgaggaccggaatctggacgtgttggtccgctgttatgggcctgttcgtttctatttcaatgagcagttggtctatcgctctaccgtaatggatgagattagtccagacgcaacggtgaagctcagcatcgatatcaagcctggttggaacaccatttggctggagatgaaaaacacccctgccggatttggctgccaatttgggtcagatgaaggaaaagtgcgcattttgaatgtatatgctccatttcaggagagacaggggcaagcggggtgggtgttctcccaaccgaacccagccacaagtaaacaaccggacctgcttggaaaagaatcagacgtcagcttgaactggctgcctgagacaggctggtctgatgaagataaaaccaagccagctttcgagcgaatatacggaaatcttgctggtaagcatgcttatgcttggacccacctgaacaataacgattcaaccgggaatgcagtgcgattgtcaggtcaatcttccggttctctaagtatatggattagcggcaagcctgtggcgcaagtgaaggaagcgggcccgttcgaggtggatgtaccagcttcttttgggcggagtgacctgcttgtccgaagtgaatatgacgatacggctggaccttggcattttaatttgaacgcaaccgtgtcgggtaagccgctctcactggaacttcctcagcgtgtgcacggagctaatggagagtcttggttatatgttggaccttttgagtcggaggttgaaccggacttggcgggtctgactcgaacggaccgagtgtatcaaacgggtctagaacagacgtattggcgcttagatcgaccggatgcttggatcagaccttattatgagaacgcgatgttaagcaacaaatggacagtgggcagtgtgaccaattatggtcgctgggattatccattgggtgtcactgtatatggtctactacggacggggcgttatttgcaaagaccggacattacacgttatgcggctgagcatgtgcaggcatgtacccagatgtatgaatactccttatgggatcgggagcagtatggtttcccggcagtcaatcaacaattggtcatgctgaaaatgctggataactgtggttcttttggttcggccatgctagaagcgtattcagagtgtcatgaaccaacgtttcttccgattgctgaacggattgcagatttcatgctttcccgcctggaacggcaggaggatggtgcattttatcgcacatgtgtaggggagtatgccgagaataccatgtgggcagatgacctctatatgagcacgccgtttctcgttcgttatgcacgggtgacaggcaactcagccgcattggatgaagccgccagacaattttcactgtatcggaagtatctgtttatgcctgagttcaagatcatgtcccatgtgtatgatttcaaatacggacaggcaacgcagattccatggggacggggaaatggctggacactgttttccttgacagaggtattggaagctttgccaacagagcatcccgagcgcccagccttaatagatttcttcaatgagctgtgtgaggggtacgcagcgcttcaaggggaaagcgggttgtggcatcaggtgttgaatgttccgcagacgtatgaagaagcctcctgcacggcgatgtttgcctatggttttgcgagaggtgtacgctttggctggttcaaagaccctgaagtttacgtcacagctgccgagcgggcttggaaaggactcatctgcaaagcaattgaccgtcaagggaatgtgcatggcgtgtgtagcggttcgagatatgcgtttacggcagagtattatgatcaggacttgcgtaccgtcaccaatgacaatcacggaataggcattatgatgctggcaggaactgaagtagcaaaaatgaagaaacatctggctgaacacagggtgtcttcacctgccgtctcacattcctgacagatcaccgaggtctgattttcatactatcgtttctacacaacagtcttctgctccacgtaatacggttgtatatccgtaatcatatttgagacgggatcatcaccgccgggaatttcattcctggtggtttttgattcctgtaactccttacttttttgacaggaaagcttacttttgtttatgtcatgtacagtaatagaccgatacaataggttttgtaagcgattccataaatgcaagaaggggaggaaattcatttatgatgattacaaaaaagtgggtaaccctgttctgcctgtccctgttattgttcgctacagcctgttctggaggggccaccgatacaccatcttcttctggggaagcaagtggaagtgaaggagattcatcaggcaagattgaactgcgcatgacctggtggggatcacagaccagacatgatctgacgaccaaagtgatccaattgtttgaagagaaacatccgggaatcaccattaagcctgaatattccggttgggacggttactttgacaagttgactacacaggtagccggttcaaatgcaccagatatcatccagatggattacgcctttttgactgactttgcccggcgtggtgccttgcttgacctgactccgtttgcagagagcaaagagctgcggacagaggatcatgatcagagcatgattacagccggttcgattgacgataaattatatgcaattaccctcggagttaacgcaccaggtgtcatctatgacgccaccgtatttcaggaattaggtatagaagaaccacaagagagctggacatggaaggattttggggatattgcgaccaagatcgcctcagccaaaggtgaggggttctatggatcggcagacatttccggtacaacgaacatgtttgaagtgtttattcggcaatccgggaaaggattgtttgatggtggcacaatgacagctaccagcgaggagcttcaacaatggttcgatatgtggagcgcactacgcgagaatggtggagtgactacagcggagataacggcatctacaaccaatgcgctggagacacgaccgatctcactgggcacagccgccatggactttgcatggtccaatcaattgctgacattccagcaggtgaacaaaaaccaggatcataagcttggcatacaagtgcttccgcatggtgtaggtgaaaagcaaatcggtgaatatctgaaaccaggccagttcctctccggttatggcaaaaccaaacatccaaaggaagttgccatgttcattgatttcatggtcaatgatccagaagcaaccgctattcttggttctgaacgtggggtgccagtcaattccagcatccgtgaacagatgcagcctacgctgccgaaagcggagcaaaccattttccaatttattgatactgtatcgaagaactccagtgagattgacccgccatacccgcaaggatttgctgaagtggacacaagtttcaagagcgcaagcgagcagatcgccttcggtcaaggtaatactccagatgtcattgcccagtttattgaaggagccaaggctacgcttggatcgagtcaataatgattgaaactgtctcacacttctaattctgcggggaggttgcgaagatgacgacatcacaggtcagtcaagcccgaatcgagcgtgtaactacccggcgggtcaaacggagatatgcgcataatggagccgcacttctgtttctcgccccatggcttgtcggattgttattccttaccctaggtccaatgttggtatcgttatacatctcgttcaccgattacagtatcctggccgccccttcctgggtcggtctggataactacaccacgatgtttacatcggataaactgttcacccagtcgctcaaagtcaccttcacgtatgtcgctgtatccgtaccggtcaaattgattttcgcgctgcttgtagcgatgttgctgaacaaagggattcgaggactcggtatttaccgtacggtgtattacatcccgacattgcttggaggtagcgtggcgattgcaatgttgtggcgtaaaatgctgggtggggacgggctactcaatagtgtgcttgccatggtgggcattaaggcgcccgattgggttgctaatccgaagtatgccttgtactccatcgtcctgttatccgtatggcagtttggatcatccatgattattttcctggcaggtttgaagcagattccacccgaatatgatgaagcctcagcggtagatggtgcaggtcccctgcggagattcttctatataacgttgccgattctgtcacccgttatcttcttcaatcttgtcatgcagctgattacatcctttcaatcgttcacgcaggcttttgttatcagtaatggtagcggagggccagtgaactcaaccctaatgtactctctgtatctgtacaaaaaagggttttcattctttcagatgggctatgcttctgcgatggcctgggtgctggtcatcctgattggcgtatttacattgctcgtattccgcagtagcaagctgtgggtgcactatgaggatggtgggaaatcatgattggacaacggaactctacagcatgggtcgtcagcaaacatgtgttgatctcaggcatcgcctttgtcatgctctacccgatcctctggatgctgggcagctcattcaaaccgggacatatgatctttacagagacctggttctggccacaggaatggaattggcaaaattacatgaatggctggtccggtattcagggcaatccgttctcccgctttctgaccaactctgtcatcctgtcgcttggcgccgtactgggcaatgtcatctcctgctctatggcggcatatgccttcgcccgactggattttcgtttcaaagccatctgcttcggactgatgcttatgacgatcatgctgccgcatcatgtgacgctgatcccgcagtatattctcttcaaccacctggagtgggtgaatacgtatctgccgcttgtggtgccaaaatggctggcgacagatgccttcttcatttttctcatggtacagttcttccggggattgcctaaagagctggatgaggcggccaccatcgatggatgtggtcctgtgaaaatatacaccaaaatcatcattccactggctttcccagcattggttaccacgatgatctttacgttcttgtggacatgggacgacttcttcagtcagttgatctacctgagtgacgttagcaaatacactgtgccgctgggtctgcgcctgttccttgattccagctctcaatccgattggggcccgatgtttgccatgtcggtgttgtcgctggtgccatgttttatcgtatttatcgtgtgtcaaaagtacttcgtggaaggaatcgcgacctctgggctcaaagggtaattccaagacgaaacgagttgatttttccatgaggaaaggaagatggtcttcatttattaatcaaaagctgcaacaaagcaagctctccacgttgatggtgacttgctttattgcgtttaacctcctgctcgtctcggttgtggtctggctggcatatcagtctttctcagcagtcacctttgccgagattagcaaagcacgtctggctcttctgaacgaaagcacacgtcgaggatttgattttatcacaggggtaactggaaccgcttatgccttggcaagcaatcgggaactgtccagtctgctcgaaacggctgatacgggcaggcttgcacagattcaccagcggagagaggtctctcgaattctggatcataccatggtcgtgagtgaaggcatcacttccattgaactgtatacggatgcctttaatgaagtgacagtgactatggctgatcgcatatttccggtggacaccatcgcacacgactcttggtttgctacgctggaaaaggctgatgcggcttgggttccgctacgtgagaacgaatctggccaatccctggtcggatacgcccaacggattttcgacagtcgtggcgggacggttgcctatgtgctcattcgactgagtagagcggacattgtacgcaggtttgccgatgtacccatggtgcttgatggaaaagtcctgttggtagatacggctggtaatgtcgtaatgcagatggggagagttgatccagcaggggagaaggaacgagcggatcgaagaaatgaagcgagtaaagtacaggaaacgggtggagctgtaaattcatcttcttctattatagatagtgcatggattcaggaacatgtccagcatggtgcagacgggtacgaagtagtttccggccaacctggaggtgctcaattggtgctgtactccaggccagccatgcttcagtggcgcctcgtacagactattccggtatatacactgttatctccgctcagacaagcaggctggcagatcctcggcatcgccgtgctgggactattatgctcggctgtgctggcgtacctgtttgtaaggcagatcatccgacctttgcgacaattaatcaagcgaatgagacaactggagaaaggggacttcgatacccgggtccaactttcgtttacggaggaatatgcccatttggcttatggcttcaatcacatggcttcacaacttacgacgctgatggaacaggtgaaggatgagagccgggccaagcgtgaagcccagacgggcttgcttgaggcccagatcaaaccccattttttatacaataccctcgacatgatccactggcgcgcacttgattacgaagccaaggatatcagtcgcatgattgtacaactcagtaagctattacggatcggactgagtggagggagattgtttatacgggttcgtgatgagttggaacatgcccgttgctacgtcaacatacagtcagagcggctaccgttctccattcaatatcaggagcagatcgatccgcatactcgcggttgttacattcccaagatcattttgcagccctttatcgaaaatgccgttatgcacgggcaccctgaagaaggcacacttcgaattcaggtgcatatgcacgaagaggttggcccgcatgaggacatcgtcattcgtatcacggataatgggcggggtttgccggaggggtggaggctcgaagagacgtgtggcatcggtgtacggaatgtacatcagcgtattcagctttattgcgggaagagatatggcgttcaactgagcgatagagagtcaggtggcgtggaagtgaccattacgctgccgcgtattgagaccgacgagcaattaaatctatggctggacggtgaaaaatgatgaagaccattatgcttgttgatgacgatcctcatattgtaaaggcattaacagatcatatcgattggccttctctgggcctcagcattgcaggcactgcttccaatggcttggatgcgctggagctgtttcaccgcatgcatccagatgtcgttatgactgacgtatatctaccggggatgaccgggcttgagatcacacagacgttgcgacgtgatcatccccacttgccgatcatcattcttagtggatatgacgaattcgagaacgcccgggcagccatgcgctggggggtgaatcactttttgctgaagccggcagaggttgaggagattgagtctgtgctgcgtgaggtgttactggaacaagatgtgcgagagcggcatgagcgactggagcagacgtacaagcaggaggtcggacgggtacttccgtatttgcgcaaacaatttcttcacgaactgctgactacgcgatatcgggcagacgagctgcccaaagaacgcatggactatataggcattcatatgtcctcccagacacgcgccattagtctgcaactgaatcgccccgtatttttgacacgaatgaaagaacgggattggcaacttctccgctatggggcggccgatattattcaggagacggtgaaggagcatgcatcgcgcatgaatggtcaggtagagattgttgattattcggatcaggtatttgtgttgcttctattaggagataaagatcatctggaggaatgcctgccactcgtggagaggatgatcgatcagatctttacgtatctgaaaattgaagtgagtgctggaatcggaagatccaagagtcacccatgtgaggtgatagattcctatctcgagagcagggaagcggtggaaacagcagagttccaaggtggaagtcgtatctaccactatgaaacatcgaaggaaacagaaccaagtgtgaccgattattcattattgcttcgtcaatggaacgaggcttgggcggatattcgacctgacctggccgaagaggtatggcatcatatttgccttttgctgaaagaggggaaatgtgttgggatacaggatgtacaggttgtggcggtcagtctgtttgacacgttgatgcatagctggaaccgacttcatcctatgttaacgccgccgctggcgatgagtgattttttgcgtgaaattcaatcgaaatatgctttgcatgatctggtaaactggatggatcgtattatctgcgactggctggaacagatacgtaaggagatgggcgagaagaaaagcaataaacttatcgagcaggtgaaacagtatgtagagcttcattacgccgaagagattagttttgaagcgatagccaaggggctgttcgtacatccgaagtatctgagtcaacttttcaaaagggtgaccggtgagaatttcgtcagttatttgaacgggtaccggattcagagagcgttggaactgttgcagtcgggacattacatggtatatgaggtgagcgagatgacggggttccgtaatgcaacgtattttagccaggtgttcaaaatgcttacgggcaagagtccgtctgaggtggggtagagcgatacaggtacagtaattaaataaagtggaagaggaggtatggttcttatgatgatcgatcagcaggaatattacattagaggcttatcttactccattagatcggcagaggaaaaggatgctgaggccttgtcttcactacgtgtacagatcgatggggaaaccgagaacatggatcgtgaagagggagaggcgtatatcgacgcagccgggtttaggcggatcattcatttggacactgagaagtcacggaatctgttccttgttgctgtagtagcgggtgagattgtgggatactcccgatgtgaaggtacagagctgaagcgcttttgccataaagttgagttcggcgtgtgtgtagcccgagagttctgggggcatgggattggcaagaacttgttagagaagtcgatagaatgggcagaccagactggtgtagagaagatgacgttgaacgtgctggcatccaatgaaaaggcaatcgagttataccaaaagagtggcttcgagatcgaaggtattttgaaaaaggatcggcgacacacggatggacagtatcacgacacgatagtgatggcaggttcagagactaatagtataaaaagtgaagagcagtaatgatgttgaatgggtctattcacaacctattattgagatagattagaccggtgagtgtatataggatatagtaagaggatattgccattggaaaagagattatgaagagattgaatcaaatatataattagtttttagatgggatattttacaagtagtaattgtgttgtgtatatgatatattctatttccggccaaaaaaacacgagaaacaaagtgccgcaggcaaaacaaataagcttcgaaagaaacttaaaaaaaagagcttgctaagttggttcggaagtgttatgatataaaagttgctgaggaggacaacgctcggtaacgaaaaca

SEQ ID NO: 14 - DNA, 138335 bp, Paenibacillus xylanexedens
  source 1..138335: mol_type = genomic DNA
tggaggtttttctctacacttttagattatttctcggattaaaccgtgaaagcacatccttcttccgttcaacagacacttctgtatatatttgggtcgtgctgacattggtatgtcccagaatttcttggactgatcgtaaatctgcaccgttgttcagcagatgtgtagcaaaactgtgcctgaggtaatgaggtgttgattttttgctaactttagataagtccctgtatttagagtaaatatcctcaatggagtaaatggagagtcgatcaccatatttgttaaggaacagagcatcagattgggggtcgaaatgttcgcgggcatgcaaccatgttttaattttatggatgacttcgctacttgaaatgtagagcaatcgctccttacggccttttccaaaaatcaacacggttctctcttcgagatcgatgtgctccatatcaatattcaccagttctccaatacgaattccaataacatagagcagttcaataatagcatcgttgcgaaggttaattcttcttctaaaactcgtgtgtaattgtttcatgtgctcttgtggtgcatttaataacttttcaacctcacttacagagagtgtctttggtatacgccttgccgttttgaattttttcccgaaaccaataattggggactcgattatatcaccgctttgaaccaaataattaaaaaatgctttgaagcatatgtactttcttttaatggtcgagtctttaagtgtgtgttcactgtttagttgttccagatacattcgtaaattttctctggttacatcttgaatatgtttagtatcaagccattctacaagtctgttgagatcagacagataggctttaatggatttaagggatagattacgctccacgcttaaataagtctcatattgcttaatataggtgtttaggttacttgtactaagtctcatgatgcctcctgatgtcgatgtcatatgttgccaatggcccgacctacattattacgcattgaacaccatttgtgaagatgcccaaaggcgtagatacaatatccgagatttgaaaaacaaaaaagagccggatcccctccgactcgatacgttctcacttatataattttgcggaacagctccatcacctcatccttggacggttgatagggattgcctggtgcacaggcatctttcatcgcgttatcggcaagcagttccacatcgggatcttttacacccagttcagacagtttctcagggatcccgacttccttcgatagctgacgtatggcctcaataacgtaatcggaacactcctcatcacttctacccttcacatccataccaattgccttagcaatatgacggaatttgccgggtacatgcttggcgttcaactcttccacataagggagtaacattgcgttacagacaccgtgcggcagatcatatacgccacccagttgatgcgccatcgcatggacataacccaggcccgcattattaaaagcaatcccgccaaggaaacacgcatacgtcatatgttcccgcgcttccaggtcactgccgtctctcacagctcttggcaaatattcaaagatcagttcaacagctgctgcagctgtcgcacttgtcactgtaaatccacccggtgtaaccatggcttctacggcatgtgtcaacgcatccattcctgtggccgctgtgagacttgcaggtttgctgagcatcagctccggatcattaaccgacagggagaccagactgttgcggtccaccatcaccatctttaatttacgttcctcatctgtaatcacgtagttaattgtcacctcgctcgatgtgccagccgttgtgttaacagccacaagtggcacggacttatgtttcgattgatgaaatccttcatattcacggatatgcccaccgttggtagctacaatgccaatgcctttggcagcatcctgcggtgaacctccgcctatcgatataatggcgtcacagccatgatcctggaatacttgtagtccatcatgtacattctgacatgttggattaggctgaacctcatcatatactacatagtctaaccctgattttcttagtatagacagtacctgctctgcaacgcctgaagtaatcaattgacgatcacttacaaccagcgccttgcggatacccatctgttcaatcacctgacctgcttcctgtaaacatcctctacccatcaagttcacgggcggaacataatatgcatgtgttgccatttgaaccagcctcctgtaacccctgatttactatctccattgtaactgaatccgttttcagatatagtgaaataaatcacaatgaatccgataaatgttacacttgaggttgatttccccgtaatgaaaaagacgacccagacacccgaaggtctccaagccgtcttacttatctatcttaaagctttatccactacttatacccttacgaaggtacttacactaaaagcatcctgacgaaggcttacagcgccttatcgttcacgccgtcaagccatgcctcaatctcaccaattacggaggatacacagccatcctcgaatggagagttcaatccagccagttcaaccaatccagtgaaggacaggcttcctcccgctttgcacaatgtcagatagtcggcccatgcggacttcatgtcctcattgctgcgtttccagaactggaatgcacagatttgtgctaacgtatagtcaatgtaatagaatggcgatgagaaaatgtgaccctgtttatgccagaaaccaccttgctccaaatacgcattatctttgtaattgatgtgtggcagataggtcttctcaatgttgcgccatgcctgcttacgctcagttggagttgcatccgggttcgcatacacaaaatgctggaattcatccacagctacaccatacggaatgaacaacagaccggaagacaggtgatcaaacttgtacttgtccgtatcttccttgaagaacaactgcatccacggccatgtgaaaaactccatactcatggaatgaatctcagccgattcatatgtcggccagttgtattcaggcactgcaaaatcacggctctcatacacctggaaagcatgacctgcttcatgtgtcaatacatcaatatcaccggaagtaccgttgaagttggagaagataaacggcactttgtaatcgttcaggaacgtacaatatccgccgccctgtttaccttttttacttaccagatccataagctcgttttcggtcatcatctggaaaaatgcatccgtctctggtgataattcagcgtacatttttttaccattatcaataatccagtccgcgtcacctttaggtgtcgggttacccgtcttgaagctgaaaccctgatcgtaataatacagcgtatccacatcaatccgattacgctgacgctctctgagtttggtcgccacaggcacgatataatcacggacttgtgcacggaagttggcaaccatctcggcgttgtaatccgtacggttcatacgatcatagccaagttccacatagcttggatatcccagtttcttcgcgatctgtgtacgtactttaaccagttcatcgtaaatgcgatcgaattcagcttcatgttcagccatgaacgtgtatctggcttccgaagcacgctcccgcatggagcgatccgtggacagttcaaatggatgaagctgtggcaacgtgcgctcttcaccttcgaacggaattttggccgatgcgatcaactgattgtattctgtggaaagtttgttctccttctggagctcttcaataatttccgggctgaatgttttcagtgaaagatccgccagttggaacagctgtgaaccccatttttgttccaactcgttgcggaatttggagttaaccaatgcacggtaaaaatccgtaatatattcctgcacaattggtgcattctcatccagaaattcgttctccgccttgtaaaactcatcattggtatcaatggaatgacggatgtagaccaattgggcttgtgtctcaaaatcactgcgtagcgcgttaatctgatccatgaacccactctgttcttcaaccgttgccgcagcttcaaaaccgctcaacagctcacggaaagatgtcttgatgtgttccagattcggacgtgtatacgtatactcactaaatttcatttatgtacaccctttcctgtttggcagaatttcgggagtatcccgagttaaactaccccctattatacaaaagagcagctaaaaaatcccataattacgaaaaatatttgtccatcggtcaaattgtgcaacatgaatggttacaaatattacttacttatgtaaggtcagtgcctcacaatttttccccacacaaataagcccgcctcgcgttagcgaagccagcttataggttgtctctcttcttttcacatttaaacaatactagctttggtctttatccataatctgatagaaccagcccattccgaccatgcccacgaccataataacggccataataatgatatatgtcatgaatgtaacctccctgcttccgtatattcatcacactactactagtgtacacggtgaagcgccgtttgaattgaccgaacattgacaaaaatacgaaatctttaattttaataaatggattatttccccgatcacactaaatcatacgtacctcgctgcacggtgcaaagtttcatccgccatacttacggtgtatactatacttctatgaaatggaatttggatttttacgcagaaaggttgaaagacatgtcaactcgcattcccttacgtcagctatttcttactgttttattagcccttatgttatctgttttgaccgcctgtgctgatggagaagcccatctaacggtgaatatggatgggtcaacggatctggatctcaatctcaacgtaaagaactccgctcttggaaaaattggacaagacaatctcatgcctctgatcgcagatgcattgaatcgaaataacttccaggcagaggtttcggaacagggagatcagaagcagctcacagcgaccacccattatgaaaaaagtaataaaaccagctttgatacgtccaagttaccacaagggatcaaggttgaacaaacaacttcccccggcttcttcacttccaagatgcacattacagcagaagccgacctcatggagtccatgcccgatggtgagatcaaaaatcaaattaacaaggtgcctagctttcttaaaaacctcttgttaaaagatgttaactttgacttcaagttgtctttgcccatcaaggcagccgattccaatgccgatcaagtagaggatggcggaaaaacgctcatttggcacgtttcacccctccagatgaataaactggatctgactgtacaggttcccaatatccggaatatcatcatcattgcagtcattggtctattattaattgctgctctgctcatttggttttttgttcgtcgcaggcgggccagacagcgccacagtgcaagatcacatcgcggaaaaaattaattcttcacaccaattttatttgtgacttgccaaacggtgttatggatagtagaatacatccgtactgtgtgaacggttaattttttattaagcaaagctaaagaggtgacaggtttcatgaatatccgcgaatgcccactacctggtatcggagttaagtaccagtttgatacaaagggcggccatcagttagtcattattgtgcatgaggacggacgccgtgaattattctccgttgatccacaagacaacgaagaactcactctgattgcagatttggaagatgacgaatgcgtaaccctctccgggttaatcggaggctggtcgtaaatgacagaataacctgtaccttgaattcaaggcacaggttatttttctgttacgttaccctttgagagcgaatatatggaacccatgtattcaatacgcggctaatctccgtggaatgaaacggtttgctgataaagtcctgcatcccgcatttcagacactcctcacggtcaccggcgcctgcaaaagctgtaatcgctgcaataaccggtatttctgggtggctctgtctgatgtggcaggtcgcttcaatcccatccataacgggcatttgaatatccataaacaccaggtcatattgaaccttgttcaatgaatcgacggcctgtgcaccattctcaacgatatcacagactccgccaaacttgcgcagcatctcctccaacagatgactgttgaccgcttgatcctcagcaatcaaaattttgatgtcatgggcaagactcgctcgatccaattgcagttcatcattcgtggtgatttcgatcgggtcattactttcctctaaccaccgctccactacgagggtgaactggaattctgccccctcaccgatctcactctgtacgccaatcgctccgcccattaactccaccagttttttgctgatcgcaaggcctagacctgtcccgccaaacttacgattgatggccggatcaagctgtgagaaggattggaacaactgatgctgcttttctattggaatgccaatccccgtatctcttaccttaaaggtcaacatcaggttatcctgaccatgctcatctgagaaatcagcacctacgctcaccataatacggccctgctctgtgaatttaacggcattacccaccagattgatcaaaatctgccggatccgtgtctcatcccctcgaatgcgttcaggaatgtgatccgacacttcacaatagagttcaatatttttctctgatgccttcagtgcaaacagctcgatcaccccacccagcatcgccttaatatctacaggtgctcgctcaagatccattttgcctgcttcgattttgctgaaatccaaaatttcgttcaaaatgtacaaaagggattcgccgctatcaatcatgatttccgcaaaacctttctgttcatcatccagctcggtttccattaacagatgggccatgcccatgatgccgtttaatggcgtacgaagctcatgactcatgatggcgagaaactcggacttggcccggtctgcatgctctgctgcttccttggcacgtatgatgtccttaacagatgtcatatcacggaaaaccaatactgctccgcgggttctaccctgatccataatcggcttcaattggaactccgccaggaaactggacccatcctgtctccagaatacggattcggtacgtggcagacctcgtccctcacgaacagcctgtagaattggtgtatccttggatgggtaggggatgccttcgctctgcatttggatcatcatctgttctaatggtttgccattcaattcacttggacagaagttcatgatctccgcagcggccggattggcaaagttcagattcccttccaggtccagtccaataacaccctcagacatgccattcaaaatcaatgcccgttcataactaagattctcgatttcctcgacgtaacgtttggactctgtaatgtcactcgtaatcccgtagaccccaacaactttgtccccaagtataataggaacattaatcacatttgtttcaatccgctgcccatttttgtgaattaaacctatctcgtagctctgtgcattgcccttcaccgtttcctcaaaatgatatcgagtcttctccaggtccacaggatcaatgaggtgatcaaaaggccgactcagcagctcctctttggtgtgtcctgtcaactgttcctgacccatattggctttcagcagattgccttccagatcaagagaagccacaccaaggggattacagtcaaataacgatctgtactcctgcatgcttaactgttgttgctggctggctgtgatatcccgggttacggcgaccatctccattaattcacctgaatcgtcatatacatagtgcgtaatcgtatctgcccataccgtagatccatccttatgtaacaggcgataattgagccgtttgggagccagaccctttctctgctcttctacgtacgcttcaactaaaggcacatcctccggatagatcacaaatgttcccggcttacctataacttcttccaactcatagcccaacatgcttttacatgcattcgatacatatttaaatgtacgacttgaatcggcatcatgtattgcaatcaggtctagtgaagactccgccagcaggcgagagatgcgactgctctcttccaattgcttacgttgcacaatgaggatttcctctgcatctttttgtttcgtaatgtcagcagcctgtaccaacagatacaatggctcaccattcgtttcatccctaacaatgcaagctctaatggttgcccacaataacgaaccgtcctttcgtttcagacgaacctccgtctcgtacatcggacttgtttcatgagtcatttcccagaacttgctgcggaattcctccatatgcagatcttcttcgtagatcatatgtatgaccgaagtatcgatcagttcatcttcactgtatgcaagcatctcgcaaaatgcaggattaagctgcaaccaccgtccatttacatgcgatgcgacagcaatgccgattggtgcgtgcgtatacaattgttcgaacagagatcggctctctgtaatggatttcgacattacatgtcctcctttatgagaatctgaatgtattccgtatgaatagatcgacctgaacataacttcatctatagagtactaccccaaatgccatgatttataaacgaggtcagacaaaaagtccacataaatcgacatctttaattttggatgctggcaactttcattgtgtacataccaattcgaacacatcacgtcatatactacacaatacccgtgctctcctgattatacaatgttgagtattcgaataggaacggaggttatagattatgatcattgtcgcaaatcaacccgtagaactgaaccgctcggaatggtctgattttgaatggtattggttacagcaactccagaatcgtccaacgaggtatgtgtaccaatccatggatcatcttcgatttgaatgggacttgaggggctctctcgtggaagccgcggaaggactggatcgaagcggtgtgagttttgcatcctttgaaaaatccagatgtaatcctgcctactggaatcgtaatgcggaaggtgggtttgagctaagatcaaacgtgaccccagccgacggcatccgggatatctggaggaatggacacttatatgcttttgaatgtgcaacagccaccgttattgtgctgtatggtggcgtgctgggaagcattcgcgaagacgcctttaattccctgtttcgcaatctgttactctttgactggcattatgacagtgacctgcgattaaccgaaaaaaacggtagcgaaaccgccctgccaggagatgtgctgtatttcaaaaatccggatgtttctccggaaacccccgagtggcagggagagaatacgttcatgctgcgcgagaacttgtattatggtcatggcattggtattgcaagtggcgaagagattatacgtaccctgaatcagttccgcgttccaggtagccgagtctccgcctacttaatggatatggtgatctatccggacttcttttatttatcccgattcgccaaaaacagccagaataatattgccgctggttctacgcccgtattacccggacagttatatgtacgacttggtggcagccgttatttacgcagctgaactactgaaacggaaacggcttttgcattaaattgcacgacacctcaatccaagtaatgacaaacaagcccaatacagcagcagttaacctgccacctcattgggctttctttacatccaaaagatcattactgcatcaacattcgccttacatttgtgctacatcgaggatcgaacctcgccgtttacgcattcgggtctagttgcacaacaacctgtttaccacttacctgaacacctgtcgttttgctaccgaattcagccaacgatttgctcagttgctcagcccactccttgcctgcaactccttctttggctccatgcacctggatgacgagttttaccgaatcacccttcttcagaatgcgctccgcttgagactgcttcgtctcccggtcatgatcctccatcgcaaggtttaatcgaatttcctttactttacgtttatcgggggatttactcgcttttttcttcgcctgctgcgcttctgctttggccgctcctgcgccaatcagcttgcatggcggtggacttgtcatcaaggacaagcacaccagatctactttatgctgctttgcaagtagaagtgcttcctgcgtggacatcacacccagatcttcaccattcaggccggtcagctgcacttcggctgctttgatcttttcatttttgatcatgattcttcctcctctacatcaaaagcctgtcctgaccatttacggatcagagcaggctaggatggtgttgctacttatttgtaatacgtattagcgtacaaatacgccaatcggtttgatttacagcgtgttgaatgcttccgtcagaaccggtacaatttgtgatttgcgtgatactacgcctttcaagatagctctgctatcagacagcgtcacattgtaggctttctccactgctttagtggatgtaccatatgccaaagctacggaatcgttgttcagaatgtctgttacgacaaatacaaacaggtcgagacctttactcgaaatgatcgcttcaatagctgcttcaagctcaggttgcttcacgagaacatcattcacgtcaacggcattaacctgtgcaatttccactttggattgacccattacgaattctttggcatccagggaaatcagttcagcaattgttttttggctcagatccgcgccggctttcagcatgtccagaccataagtgtctgcatctacaccagcaatggcagccagttcacgtgcagcggctacgtcctgctctgtgcaagtcggggatttgaacaacagggaatcggagataatcgcagacagcatcaggccagcaatcggtgcactcacttcgatgccattttctttgtacattttattcaaaatggttgctgtacaacctacaggctctgcacggaaatacagaggaccgcttgtctcaaagttagcaatacggtgatggtcgataacttcaacaacagtcacttcctcaatatcgcttacactttgctgacgctcgttgtggtcaaccagaataactttgtttacttcatttgcagctgttttaatcagacgtggtgctgcaattttgaattgatccagtgcaaactgggtttcaccattgacttcgccgagacgaactgcttcaacgtcctgacccaattttgttttgagatccgcataggcgattgccgaacagatcgtatccgtgtcgggatttttgtgaccgaagattaacgctttttccatattcatagccctccgtcaattctgatttagaataatacatgtcatatttcaatcataccctactgattatagcgctaataaggcttaattccaatccctttacagcgaattaattgcaaatcattctcaggcaagtcattttggaaaatagccaaacttggttcattccctcaagctgatatgctatgtatcctatttattccatcgtacaaccttataaattagcatacgaaactctgatacgcaacgaaaacattaaatctcaggctcttccgcgctctgcccttgccgtacaaaaaaggtctgtagactgccgtcctcgctaatctccagcaggttcagttgtgctccgtaggcacaaccaccatcaatgccaattttgtctccgctcgggtcaaaccaaatgcctgtctcatcatgcaaatgcttcacgggggtgtgtccaaatacgaccgtctctctaatcgtcgttggtttggaatagaatgattcacgaatccaaatgaagtcccgctcggactggcttctccaatcctcgatatccgggttgatcccggcatgcacaaaaatataacccggaatctcgtacaccagcggaagctgttccagaaaacgaagatggtgttcataatgtgtacgtatccactttttggcttcagcataagcttcccaatctatctgttgctcatcataagtaagctccagatccagataacttgccatcgtctgtagtccaccattacgaatccagtgttgatcatattgctcaacatcctgggttaacgccttgaccatcatggcatcgtgattgcctttgatcaccataatatcgtgctgttgctgaagctgcataatctgttcgatcacctgtttgctgcttggacctcgatccacataatcaccgagtaaaatcaattcatcctgctgcggattataatctgcaagcttaagcagtgcattaaattcatcgtaacagccatgaatatcactaatgacacatctgcgcatgtgaatctctcctctccctgatcacgcaagagtataaccggaaccttgcatgagcaagattccggtctgttcagagtagttattcccgcttgcttaccattagtcctgcttgagtccaaaggcttctgcaatcaagccgaatgagcgcagacgtgcttcaaacgaatggaccgctgatgcaataatgacttcatctgcttcatggcgttcagccattgcggtaattttatctttcacctgatccggtgttcccacgatggaaaaagaacgacgttgacgaatctgttccatctccatcgctgtgtatggatagttgttcaccgtctccagagatgggaatgaactttgttcaagacctcgtccaaggcgtaagaagaaaagttcattgctgcgtgcaagttcagcggcttcttcctctgtctccgcgcagaatgccgaaacagcaatcattgaatgtggtttgtcattcaggatggacggtttgaaatgtctgcggtaatgtttcatcgcttcttcgccgcctggtgttccgaagaattgggcaaacgcatacgatgtcccttgtgctgcagcaattctcgcaccttcggagctggaacccagcaaccacacttctggtaccgtgggaaccgatggtccggctaccagagatgcaaaccgatgatcctcaggcaattgctcgtggaagtatccgcccagatccgcgatctgttgtggaaagaattgtacattcgatgatttcccttcattcagagctctgctggcaatcggcatgccgcccggtgctctgccaatcccaaggtcaatccgccccggatgcaaagcttccagcagtcggaaattctctgcaaccttataagcactataatgaggtagcataacgccaccggaacctacgcgaattcgatccgtatgtgcagccacatgtgcaatcataacttcaggactggagaatgacagcgcaccactaccgtgatgctccgacatccagaaccgggagtaccccaattgatctgcatgttgtgcgagtttcaccgtttcctgcaacgtatcctgtacacttcgtccttcattgatatgtccatgttcgagtacactcagtttcatatatattcaatcctctcgtctgttaggttcataagtactgtaaatatgagatctgcgaatattacgcgttttgctcacttcattcttgctcattccattgtaacattaattattacagtttcaaactttagttattctctttattaccacacttgtgcaagaaacatgcaaaaaaacgccaccagcttttgaactggtgacgtttttgatctgacctattgcagaaaattgatttatggtgcacgttttggtaacaacttcacatactcgtcagacagtttcatcaggctgagcacatgttcataatcggcacgatacggttccaaatccgttaccggctcgtatgtcttcagcgaataggctgttccatcgtcaaagcccgcacccgggataaacataatgtcatcgttgacaaatgaacccgttggcaagtaataccggataccaaaggcattgtggtccatgttgagcagatcatgtccgaaggcagtgaatttctcagcctgtagcgaaactcccatcagattcataatcgttggcaacatatccaactgaccgcctggctgctcaatcacttgtcctttggtctgtttcggcgtatgaatcatgaacggaatgttaaaacgacttactttgccgtcataagcaacgcccagattggcctggatttgctgtgtaatctcttcgtcagcaggcagaccaaagtggtctccgtagagcactaaagtagtattatcccataatccgtttgccttcaactcattaatgagttgaccgatggcataatccgtatagttgatcgcttgcagataatcgtgaagcagtttgttcgtgatggtcgcaggaatcgtgatccgtgcacgatcagcgggaaccgtaaacggcgagtggctcgatgccgtaatgaactgagcatagaacggctgagtcgcagcctgatgcgcagtcattttttccacacctacacggtacaactcttcatccgatggtccaaagtcattgaatctgtcattctcgaagctgggcttgtcgaagtaacgagtgaatccgagtgccggatacatcttgttccggttccagaaggtgacgtcattgacgtggtacgtctcggactcatatccctcttttcctaataacttaggaagacttggaagttcgcggtcactataacctgctgacatgggcacaactccggttggatagatagacgtgttcgacatgaactccgcatctgatgtgtttccctgtccgatctgttggaaaaaatgagagaaataatagctttctttggccagatcattcagtaccggcgttaactcctgaccgtctaatgaagcattaatcggaaaattctgaaaggactccagttgcagtacgatcagattgctgcctttggcctgaccaaaatatttggctttcacggctgtaccgtcacttggtttatcctgatacggatactggctaaccagctcattgatcttggcaatcgtttcgttaatgttgccattcgcaatggcctcattttctttgctcgtcagaatggcagacgatacctggtagttcaggaaaccgagattctcggctcgcaccaactcgttatcaatcgtttcacctttgacaataaaactgccagacagcacgatgcagaatgcagccgtaagcgcaacgccgagcttgccccagtaacgtctacgaattctaccaaacgtcaaaccgctatcgcggtaactgctgtggttacgcccgccagcacgtctacgcataatcatccatattggcaatgccagtacgatgtctgcaaaaaacagaaagtgctccggtcgtaccagtggtccgatacttccccgtacttgggcaacttgccccagctcacttagcgcggtataggtgggtaccgaactgaaatgaacgttatacagcgtagccgcgaacagcaccagagaaaacagaacattaaatcctccgtatactgctcgcttccagcctttgggcacaatcagatccagcaggcaaaccacagttagtgcgcctaatgcgtcagttaacagaccgatgccggacagaccctggaaaaagaaataccgcaacagtgacagcttcagtagcataagaatgaataacacggcaaataaggtccgtgatgaagttcgttcatttttggaattatacatggtcgctttcaacccttaccctgaaattttacgttcattttacaaaacgcatatttcagtataacagttttctggttgctattccatggaagttccgtgtaggacagggtgatcgttacgcaattgtagagatatccgtgttctgcgtgtccgctccctctctctgtcccttaatggctgcttgtgcagcagcaattcgtgcataagggatctgttcaggcaaacagcttacgtaatccagaccaatgcggtggcagaacgtaactgactccagatccacaacattttctccgcagatccctgtcttcagatgaggttttcgaattcgaccttggactaccgccatctcaatcagttgtccgactccctcaatgtccagcacatgaaatggattattcgttaccgcacgagagtccgtatcacgttgaaggagaaggagccgcttctcagcttcatggcgactatatccaaatatcatctctgtcagctcatccgtgccaaacgagaaaaagtcagcctggcgagcaatgtgagtcgccgtcagcgccgttctcggagcttcgatcatcgcccccactctatagagacaatgccgcttctcctcaccaagcacttggtcagccacatgatccaccagatctctcatctcctgaagttcatgcacatgaccgatctgcgggatcataatctcgggacgtacccaccagccttgccggatgcctttcaccgctgcgcggaatatcgcttccagctgcatatcaacgatctccgggaacaccgtactcagccgacaagcctgttgccccaatgtcggattatgttcatgcaattcagagactctgcgaatgacacgctccagttcctccagttcaacctgatggtctttttgctcctgccactcctctgcttgtaaccactcacgtcgtttctccaacactcccagatccggtaacagttcatgcaacggcgaatcgagcaaacgtatcgttaccgggtatccatccatcgcttcaaatatctgttcaatatcagactgctgcatcggcaacagacgctccaaaccacgcctgcgttcggattcactgtctgccaggatcattttttgtacaaatggtaaccgcgcaggtgataacagcatgttctccgtccggcatagacctattccctcggccccttgtagccgtgctgtcatggcatcctgtggatgatctacattggccagtaccttcagctctttcacttcatcagcccaattgagcagtagttgcagatctgctgataaaagtgaatctgagttgttataagctggacattcatcattagttactggctggatctgtataggcagatgtccattgctcgcttcgctgttagaatctgtgtagtgttgcttcaacacttccgtgatatgcgcaggttcgatgcgaagaagtgcatcctccttggtgaggagtccttcatggacaaaatccacagtactcctcagtgtggctgttgaggataatcgtgcgggctgggtctgcacaatatacaacgcgccggattcaatcacaaaggtgatttcctgcacttctcccttatgcgtctccagctggctacctatctccagcaaacttgtgtacagctcaggttcgtcattccgtaaacgctccaggctgtgatctgtttggctcgcgttcccggttgggacatattgtcctgtaattcccttttctcctgtaagtgggttacacgtatatattgttccggtcccgcttgattctccacattttccatgcatcatcgtctgtataagaacaggagcgctttgctccgaagagatgtaatatgatttacgcatgatctcgtcctgagatctggatgctttaatacgctgtgaatgatataccgcacgtactgcttctttgaattgaatttgaacatcttgcggaaaagggttacgccccttcgcttcaattaaatatttaaattcggtaatggataattcaagttccgcttcatcctgacccttgacatgactcgatatttctgtgaaaaattcagacggaattgcatataccagctgtccatattcctctaagtaatctagataacattggagtgcatacaaccgatcaccggtttgacgtgcgagtccttccacagtaacatcattcagaccaacattgagcagtgatcgtgtcgcagttgctgaggctcgatcctggtccgtacgtaccgcgagtagtagcggattctccgaatgtccgaagaacttcccggtttgctgttccagatgccggatcgcgttaataatctcttcctctccttcaccggaaagatgtccaagacgggtacagaactcgcgacagcattccgttgtgactacaaatccggctgggacagaccaccctgcatggattagctctgcaagatcagcccctttactgcccattagccctttaatctctgccgtaccttcttccaacagaattacccgttttgtcattacagctctcccatccgccattcatggctatgcttgaagacttcaaaccctgcgttacagatcagccttcactctaatggtatgtcacaatcgttcagtcaaggacatccgcttttgcattttgtgctcgttatcctgtttttttgtaaacgttacactaaaataagatgaaacaagcctttcgggtaattgtattggctcattcatcactgggaagcaaaaagaagccccttcagctaagctggaggaacttcacattttttagtattcacttacctcaaacgtcaacacccgatcaaacaggatataatccttccgactcttaaatggccctttgttgttgtcgtgtttattgatcgcatacgatgcttttccgcttccagcttgcttggcttcataccagtcgatgaaatcatttacttctttcaagcttaggtcgaattccttctccaagcccgttgtcatggtaacgacgagaatcgcacggtcgccaggaggttgttctggtgttggagtgtcggtctccttctcattcacagctaatacaacttcattggaaattacggtttccactccattaaatatggcaacaatttgaaagtagtaagttttaccgtattctaaattaggcacttggtaaactgaactttctttcccttcaattgtaaccgaatctttataactccctgaatcagtaccatattgcagtttatatcctgttgcatcatttattgtattccaatttaaggtggcagtcgttcctttaacggaaccatttaatctaatatcttctaaaatacctaaagttatctcatcaattgccaaccaagaagacccgccttctccatcaatctttattccttcgtattttccttgtgtaactttaattggcggaggtgtgttgaacctttctgataatgattgtgtttctttttgacttatagcggtccattttccatcctttagaccatatatttgatatgaaaccgctctaataggctctgctgcagtgctaatatgaacaaagtttaactcagttggctcgggaaatttaagctctatgctaccattatatgtaccagcattccattcgttttttaatttcctatcaattacatttttcgcaacgtaaatagaatactcactacttgccttaacttcagttcctgtaggtggagaaaatccaagcatgccatctaccttattactcaatggagatgccgctcttgttgtcgactgagaaaacaacagtactataagcaaaacagtcataaacgccaaacaattttttttcatcgttaatctccttattcattattcttgaactaactatagcgaccttccagattaacgtctaaacataaacttgctgatctataaatatcagctaatttcttgaaattttattttttattggattttacacttcacaaaatactcgtttctattcataaaaactgagtttaattacattgcatctaataagatacatagagatacgaaaaaaaaagccttatgtataattgaagttaaagtacccccattaattgtctgaaatcattctctaactcttctttcaaatgaggtatggatgcatttatagagttccatgcatcgtgccatacatctttttgtcttacttgcgagtcttcagtgccgtctattaatgaatctctcatagcttctataatacgcaaggactccttaattagcatatctatactttcgcaagtagaattaccgaaaaatatcttattaagctgataaaacctcagaaattctccaacagctttgtatgcctcttttgctctatcttcaaggtttaatggccctatgtactcttttggccaaaaagtttgcaccaaccaatgctccattttcactaaatggctatacataatttttatcacttctgcccgatcattatgcaatttaatatttctaatttgatgcaactgcaactctctttgaatttcatacttatattgctccactgatttatttaattcggatttgtgggattctacatttttattgagccaactagaaaatatggactttgtaagccaaccagccccacccactatcactgcagtttgacctatttgagtaaaaacttcagatacaacatccataaactcatcctttcaaacaaaataagagggccgccatcaaaatactgacaaccccttttaccattgtcttcggaattatttttcccaaactaccacacttatccttctgctttcgggtctctcatgtctccatttacctcgcggaacactgctaagaaatagcgtcttaaccctatgacatttcttccatcttaaattggtgcaccaggatgcgatccctcaagccataaaccgcaatacatcctcaatcttcttcccatgtgagatcacaccgtaattcatccacgacataaagtccacctcatacacattgccgctcttcaccgcaggcagacgtttccattcatccctatcgagcagttcgcgctcatctcctggtttagcagaatttccagtgtcaaatgtaatcaacaagtgatccgcatggagctgacttaactggtccaatccaatgaaaatcctccgctcgtgtcttgtccattgctgcacacgggagtggggagtcagtccaagatcctgataaattacaggtccgacatagccctgctgaaccccatagagagtaatatccgaagcagatatacgcaaaaaagctactgtttgaccacgcatataacgtgctaaccgactcttagcttccattgccttgtcctcatacgcaccaattacatcttgaacccgattcaccttccctaacacatcggctgtcgatcttaaaatggagcgccagtcctctcccaaatgatctacgtaaaatgtaggtgctacctgcttgaagcggtccagattccatcgatcatatcccttatccagcatgataaagtctggtacattacccagattaaactgcgcatccatctggctcacatcaaattcaggtacgtcatccaaccccaaatattgctgcctgccccaagaatgatgcgaacattgcagtacaggttttacgccaagagccaacacaaagtcctccagataaggagcaaagacacgaacctcttgacggtgatgacggcggtataacccaggtgaaataccagcatattgcttaaatcggcgaccaaaataatactcgctgctaaatcccacattctgtgcaatttcatggatgcgatcatccgtgagctgcaatagttgcttcgagcgctccagccgaaccgcatttacatattcaagcgggagcttgcccgtaatttttttgaattgccgagtgtagctggctcttgttagaccaatatctgctgcgagctcatccacggttatggtctgatcatagtggtcgccaatataacgaattgaactttgaagacgggcacggtcatcgggtacttctgtttcgagggcactatggcgaagcaaggcacgaaaccactcctggaaacgaagctgtacctcccattgctccagccaatcgccagtgacctgttgacgcagtatttgttccaaggcttccagacaggaactccacggactgtaactgagttgcataagcggtaataatgtcggagaatctggactttgggaaagttcctgctgcttctccgtgtttcttctagacaaagcgttcgaagtctcttctttcaactcagccaccataagatcaagcttataatactgcaattcactttctgtccaaggcgaaccttctattttaacggatgttccagccggaacaaacataatcattcctttttccagatgagattcccgatctgagcaaactattgaacctttcccagacgttacaacaaatatggagtgtgaagtcgacattctgtataacaaacgtttatcgatatgagattgatggtgatctacgtattccatatgctgaagtgagcatagccagggcttggggatcagttgtattatggtgtggcacatgttcatcgtccttaactgagaattattatcatttaaaatagtgtatacgaaaaaagaaagctcttcaaccctggctgaagaactttctttaagtaatcgattcaattatggagtcattttttccaatagatcatcaattttcatggaatttgctgtaatcgcacctgattgccaatgtgatctttccatgatgtacacctgattgttcttaacggccggaagagatttccacaatttgctgtcaagtaccttcaaggcttccttgttctcaggagaagaccattcaccattggatgggaacacaataagatgatctgcatcaagttgcggcacggcctcttcagacagaatttcctgatattcttccatcttgttaaccagaggatgaggtgttagaccaagctcggaataaataaatccggtaaatcgattcttcacaccgaacagtgccagtgtatcatcgttaacattcagtcggacaactgcgacagtctcgtctccaaccgcttcctgcaacttcgccttagcatctgcaatcttggcctcaaatgccgcagcaacttcttcacccttgtccggtttccctacaacatcggcaatggttttcaaaatttgattcgaatcctgcagtacgctctcaggcagacgatatgtcggtgccaccttggagtacatctcatatttctccatatctaccccaccatctacaatgatgagatccggatcatattctaacaaagcttcaatactccccgtagtatcaaattgaggaacatccagtcctaaataatcctgtacaccccacatcgggttataccactgcactacaggtgtaatatcgagcgccttcaaataatcttccacatatattccagcaatccgctgtggttgaaccggaatcgtcacatctccaaattcatcctgtacaactcgtgtcgcaggttctgtctcggtttcagtagtattttctccagaagctgcactttcagttgcaggagtctgttccgcattcgtagcggtatttgtactacatcctgaaataaccagacccatgagcagtaatgtaatcgtccaccctttgaaacctttaactaaacctaccatgttacccttcacccctatgtgatctgttaatgtaaccgtgagaatgtttcacatataatgattatcattctcatctattgcttaggtgaattgtaactcatgcttcagccgactcacaatgtacatttgatgctatttttttatacaaacgaaaacacccttgttggtcctccccccgcttatcgcaggggcaacctaccttgtcgataactttccaacagttgatccacaaaggaatcgttcgccgtaccctgtaacagtgcagcaccaattaaaccaatatcatcacttacataccccgctaactcaggttcgccggtgagagccaaggtctgtttaaacgcctgttccctacatgcgcgcagcacctcttcttcagccaccactttatcttgagcccatcgttcaaaagcttgcatccactcgtcagcaaatgcagaggcatccctttcatccagataaatttccacatccaatccttcgaatgtctgctgggtcagaatctgtccctcattaagatccgccagcagcttctccacatccgttttgctcattgatctctcctccagttcctcatcatgtcaaatacatctcaggtataacaaaacgcttcatcattcgattaggatcggctgtaaaatgatccaattgaaattcctcatattcgctaaggatactttcaaagataccagcgatcacaccacaatctgccaaagcattgtgcctgtgaattccatctgtattcagatcgtaataccgaatcagaaaatctgtagaaacgacctcgttaatctcaggatgaatgtaggtgaacatcgcttttgtatcgagcaccgggttggtcaacatcggaagcccatactcatcacaatgccgcttcaagatgggtaggtcatactcatatccagcttgtgtcacaagaacgttatcaccaataaatttctgaaattcctgaaatgcttctacgaacgacggagcctccaacatttcctcattcgaaattcctgttaatttcgccacaggttctggtattggtttgttcgcgcgtgtaagtgaagaaaatgttgtcttgcattgatgacctctttggtaatgcatcgcgccaaattgagtcacactctccaccacaggattaatgcctgtaccttcgagatcaaatatgcagtacattctatcctgtaatgaagatacgcttagattttcaataaagtatgtatcaggcaaaagcgtaattttcatccgccaacttactcctccccactatcattccggttaatgcatttctcatatataactctgtcactcccacaatcgggtgacctggaccaacttgcgcgttccatcaaactgcaatttaaaaatatccggcatcgtagtactctcccaaaagtcatacccgtaggaagaatcataatgttgtaaaataagtgtcatgacatctccatgggttccgatgactaccttgtgacccacatgtttatccaaaattttttcgatcaccgttactgcccttgagcgagcctgttcaccagactccccacctggatacgcaaacgtaggatcacggtacaacggctgcttggcttcacgaaaattatcatgcttcacatccgaactcgacaactggcgttcacgcaaatcttcctctgtcaccacgattccacctgactgatctgccagaatctgaatcgtatccaccgctcgcctgtaggggctagaataaaacagttgaatctgctccccatggagcagactggcaaccgttcccgcatcttgatgaccttgctctgtcagtccacgctcgcgttcctgtccttcaacatatcgagactccgcatgtctgacaaaatacaaaaacgtactggcctcactcatccgccaacccttttttcttctcaatgacaatcaggcaggtactgtctggcaaaggcgcaggctcaccattttccttcatgaagatcactcgttctccaagtgcttccgtgtacccctcctggagaaaatgtcggaacgtaatcatctcggcttgttcacccagcgcttctcgaatacagttctcataggctgtcggcgtgaatataccgaactgttcctgaatttcatgcacgtatgcctcttcgccccacgtataggtgtagagaaactccattgcatcgttgatcggcaatacgacctcattgtctgagacccgctcatattgaattgcacgtccctgaaaatcctctgcataccgctccagccagcgcatcccatccggttccttgaaacgaatccggtgcttctgcgcctccggctcactcatgatcccatcccgaatcagaattcttcctccaggtgacagcacacggaatgaacttctcagcgctgctacaaccgtatcggaattaaatcttcgaccgtccagttcaatatatgaatataattcatgcagaatggatgaaaaaataaccgtatccactgtgcccggctgcacatattgctccagttgcagggcatcgcccttcatcacttgccatcgatgtccctcacgttgttttttgcgttccagcgcttcaatgacattggctgagatatcgataccaatcggctccacttccggtttttcctgctcaatcagatccagcagaattcctccacctggaccaatatccagtactcgtttaccaacgatatagtcgagcagtacttttttgtaatcaccggagctgttcatatcggacaaatacgtctcttcgttgtggaaacgatcatacgcatcccggcgtaatccgaacaggtcaaataacagcagtacagccttctcgtataacggcgacttttccgcttcaatacagaatgcaatcagcttctcggcagccggagaaaattcgaaggtcacgaataatgtatccggcagatccgtatgacgttcaatgcgatgggttagatggggatagacgatctgctcccctgccacaatctgttcccacgaatactgttccaaatatttttcaatcattcgtttcttgtaaatattgagcttcttgacgcccttgtaatcgtaatacatcgtattcatcaatggttcgaagctgatatggcgaacgatttcagatcgactctccatggatgttggatgcatgctctcgctgcgaagtgtcaacaggaacactttcaccatctcctgcaacgaaaaatcctgcatggccgactccacataccataatgtgcgatgagccagcggagccagcgcctgttctacatccagttccgtttggagcctggcataagccgtatccatagcttctccttgccgaatggatgaacttcttaagcgggataaccgttccttcacgctccagtcctcatgattcggtccggtgataatccagcctacaattcgctgtacctcagcctgaacctgattccataacgctcgatcaacgcctgcaataatgcactcatttaatgccatcagtatggtgtgcaattcatctgtagtaagccatcctttgacgatcaagccgtgaagcggagcattttcggcaaatggaatctcaccccgtatgtattgaccaataagtccatgtgtagcaattagagtacgtataatctcatgccttggagtgtgtgtattcagcgcatcatgctcgcttatatccgcattgttacttagagcaccactcggagaaccaagttgatatatactcgtctccttggtcttaccgatgtcattatccaggtgctctgccactgcgtataagtcatataactgagcggaccccacattgtgtacaaacaagttaacgccctgcttttgccatacccgccgctgctcccgtgatccggccttcgccgtctctgaccagattaatacgtcttccagaatttctcgcacccaaaaagaaacctgaagctcctccaacacatgcagtgtacgctcggtgtagtccagtaccggatttgttccctcaagttcggcaatggaatgaatgcgttcgaggttaatatggggtttctctgctgctgccagcatttgcagccatagctgctgcgcttccggcgtattacctgacttgtatgattgtatggcctttaatgaatgcagcatgaatatgtcccctctctttctctaccctttttatataatatagttagattcgtttatagaagctaaactattgtatagcaggctctgtatcttccggcaatgtgcggctcattaatattacccagattcgagccatatcacccgcagtatctcccgccatgccagtcatctattcgataacccagtatgggtcaccggcctcactgagcataacattatcggtgtgaaaatcgccctaccctccctttactcgaactcactgcctcttactttggagaaaaccataaaatcgaccagcgtacctgtactgtcccgccgcatcttgcgcagtataccttccagtgtataacccgctcgttcggcaactttggcacttcgcacattgcgggcatcacagcggatctccagccggttcgcctccagatgagtaatggcaaattgctctatcccttttaccgcttccgtcatcaaaccctcgccagctcgcgatgttcgaatccagtaaccgatctcaaaacagcgggcattccagtcaatgcgatgtaacccgctgctgcctaagaattcatccgtatgtctatcacgcaaatgtaaaatcatgtcggtacgttccagatattgcagccttgctttgcgaacggtcatttcagactcttccaatgaagggattttctcggcaaaaggtaaccacaaccgcagctgctccgcactctcacggaccgcttcattaacggctgcgccatcccccactgcggtgctcgaattgtgaggcgttccgtatggaagctctcgggaagcgttagcataatcggattaaatgttgacgattctgtcatcgttatacctactcctccacttgaaaaatagaatcaatgatcagcggcaaattatcccttacggacactgcaccgaatactgaacgagcgtgtaccccctgatccccgaatacctccatcatcagatccgagaatccatttagcactttatgatgctcctgatacgaagcggacgcattgatgaatccctgcactttaaccactctcttcacccgatccagtgaacccaacacatctcgaacgacagcaagcacctccagtccagcattccgggcaaaatcatacccctgctctgttgtgaagtctgaccccagtttgccgcgttcggaggtatccggtcctttcccggatacatacataattccattcacaataacggcattggcgtatttcgctgcgggggcactggcctgtggcaaaatgatccccagttcatttaatctcgcttcaatcatcgtatattctctccctcttttatggtcctcacggaacccgattccttgtattcctgtctataaactcttggtgatacctgaacggtacgtttgaacatcttgccaaaatgagagaagttactgaaccccgcaagccaggcgatgtctgtaatggattcttcactttctcgcagtaaacgctgtgcttccttcacccgtaacagattcagataatcactgaaggtaaatcccgtcgtttgtttgaacaatcgactcagataatgcggactaatgcgaaacatgcccgccacctccggtaatgtcagtggtttctgatagttctcattcaggtaacgtacaactgcctgtgtcttgggatgaagaaccggctcacgatcatcggagcttaacctgcccaagtgttgattacgataggcatggagcaacaattcaacagcccggtgacggagcaacaggttgcttccaggttgaggacgaagcatttcatccaccatttcgctaaccatccgttctagaacctccgtgacttgagatggaaaccttacaataggaatctcccaacagaagggttccttcaagccttcaactaactcgggggaaatagctatggctgcaaaaagctcaggcttcaaatacagcaccatccgctcatggtcaggcatgccactctccaatgttttatgaaccgtatttcggtcaacaaacaccagatcgccagcctttacccggtaggtccggtccttaatgaaatagatacgctcaccagacaacaggtaatacaactcataatgatcatgcagatggtcatccgtcatcgagaaatatccaatgcgacgatcatattcgatgtgcagcaaatccgtcggatcatgaaaatctgcacgaaaaggttctgtcatgtcgccctctctccttttcataaattatagcaaaatatgcggcatttgaaagcggttacgcataaaatgcggcgaaagaagtactcccttgttatagtctagagctatattcaaggaggcgatagacatgagtaacaagaaacgttatgtattagtcggaaccggcggccgcgccgaatttttttatggtgctttgacccgggattacagggatacatccgagcttgtcggcttttgtgatataaatcaagtccgcatgaactacgcgaatcaactattgaaggaaaagtacgagtatcctgaggtacccacttatcctgcagatcagtttgatcagatgattgagaacgagaagcctgactatgtcatcgtaacgagtgttgaccgcacccatcacaagtacatcattcgtgcgatggaactgggttgtgacgttgtcaccgaaaaaccgatgaccatcgatgaggagaaatgtcaggagattctggatgctgtcaagcggactggccagaacgtaagagtcacctttaactaccgttatgcaccgcaccatactaagattcgagaacttattctgaatgataccatcgggaaagtcacttccgttcactttgaatggctgctgaatacccgccacggggcagattatttccgccgttggcatcgggacaagcgtaatagcggcggactgcttgtgcacaaatccacccaccacttcgacttggtgaatttctggattggttcgcaaccggataccgtgtttgcatttggtgatctgatgtattacggcagagaaaacgcagaagaacgtggtgtaacgcagttctacaatcgagcaacaggcaatccgatcgcaaaggatgatccttttgcactgcatttggattcggatgcacatatgaagtccatgtatctggatgccgaatcggaagatggttatcagcgcgatcaaagcgtatttggggatggcatcaacattgaggatacaatgggtgttcttgtgaagtatcggaacaaagccattctgacctactccctcgttgcctaccagccatgggaaggttaccgcattgccattaatggcaccaaaggccggattgaaatgaacattgtggagcaatcctatgtcaattcattgggtgacaaaagtaaagaaggtgctttaatcggtaaaacgttgcgggttcttccaatgtttgatgcgccatatgaggttgaagtggaagaaaaagcaggtggacatggcggaggtgacccggttctgctgaatgatctgtttggagagcctgttgaagatccgttccatcgcgctgctaaccacgtggacggtgccagatccattctgacgggtattgctgccaatcgcgccatcgcgacgggtttgcctgtcaatgtcaataatctggttcgtttctaagtctcccaggtctgcactacattattaatttcatttaaaggctgcgcatatcacgcagtcttttttatatttttataattaatctgcacgtcgactcggtagaaggaggaaatctatgttcttctctttaaaaaaccgcctgattgcctttatcgttgtcctgtttgtcctcgcttttggcacactctcctacctgctcttcaaggaatcacgcacggtcattcgctcttacatcgaatcctctgctcttgagaaaatggaggaatacggttcatacgtagacatggtgcagttgcagatctacgatgtcgcctctcttgttttcaatagtgatatgggcaaaaactgggataacgcgatcggtgatccgaacctgcccgaaggagaaaagatgctggccaatcttgcgatgagccgttttcttactcaggcaaccaacagttacaccagtatctcggatgtatccatctatcgtcggaatggactgcgaattggcagcgagaatcaggtaacatatgaccctgcctttgtacaagaatcctggtatacgaatttttacacgttgggagaacgctggttacctgcacacaccgatcaacatgaacttgtcagagatcatggtaatccggtggtcagtctgctgatgcccattggcacctttcatcatgctacagcgcagaatgtcatgaaggtgaatgtcagtgaatcttattttctggagccgctccggcgcatacatcttgcggagaatagcactatttttctactgggcgagcaaggaaatcctattctgtcacagcaggtagaaacgttgggtgctgtagctaccgcagagatcgatcgttttcgaaacagcccgcccaaatccggtgtggcatacctcaaaaaccaggaaggacagcgagacattcttgtattcaagaaactgggacgtaccggctggatgttggcgggtatcgcacctgaaaaggaaatgtacctctctctccataggctccaaagcacaattgtggtggtgacgattgccctgattctggtctccctcttggctgctgcatggctatcccatggcgtaaccaaacctttgaccagactggtgctggcgatgagacaggttcaacgaggtgcttttgaccaagcggattcacttctgcctccagataaaaatgtaaagagcgagatcagttatgtaatcttcactttccgttatatgatcagtcagctgcggcagcatatccagaatgaatttgaactgaaactgcttcgccagcaagcagagtacaaagcacttctcatacagattaatccacattttatgtttaatactctggagctggtaagcagtcttgccattcagcgccgaacggatgatacggttcaggtcattgaggatctgggtaaaatgatgcgcttttctatcaataccaatgacgaccgtgttccgctaaccgaagagctggattatgtgcagcgttatatctccattttgcagactcgtttcggtcataaactcgacatttcggtaacgttagaaggtacactgaactccgtggtcatcatcaagtttattcttcaaccacttattgaaaatgcagtgaaatacagcttccagcatcagacgacagctcaggtacagatacggatcaaccggatgtatgatcgtctgcacatcagcgttttagacaacggaccgggtatcccggcagaaataatcaataagttgcaacatccggttgctccctcctcattggaatccatattgcataatgaaggctggcatattggactgagcaatgtcattgctcgttgtcgtctgcattatggtggcttgttcacggtccatgtggagaacgatgagcgcggaggagcttacattgaactgactctacccgtacaggaggaatatgatgtacaacgtattaatcgcagatgacgagatcgaagttcgcgaaggattaaaattgaaagtcgattggcatggcatgggttttgtcataacaggagaagcctctaatgggatcgaagcggatgaacttttgaaatctgaacattttgacttgctgattaccgatatgaatatgcctgtcatggatggcatcagactattggatgtctgccgcagttataacccttccattcagattatcattatcacgggttatgaggattttcaatatgccagagcgggggtccgcagccaggtcatggattatttactgaaacctgtaacccgggatgaattgaaagccacattaggcaaaatcaaagcggatctggatgacaaacgtaaaatacgaggcgattccgaattgatgcaatggcgactctctcagtattaccgggaaatgaaggaacgtttccttcttgatctcgtcaaaggcaatcgcctaccgccttcctccatgccagaacggctcagattgttccatctcgaatcatggcaggatcagaaggtctgtttcatcaccgcgagtataagtcaatcggacaagccggatattcgaaaagatcgattacacgagcagatgcatcttcctttcgaaatggtatgttatgaaatcgcccagtctgattcagacaatgtccaggtttttcatgatttggcacacgcaggcatcatgcatttcatagtgcaagatggtgagtccgtcagactatcgcttgctgcattccgaaaaaatcgatagtcatgatccgaagaaatgagattcaagcttctccccttccccggtatgatgtggttaccaagagaacgccgcatgttgtaagcggattcataactggtaactattattcttacccattcagaagggaggcacatgatgaaaaaacagaccaaacccttatacggtcagcacaataccacagcctacttgtttcttctgccctggctgatcggactcttctgtctgacactgggaccgatggttgcgtccctatacttatccatgaccaaattcaatctactgtcatcaccgacttggactggacttagcaactatgttcacatctttaccgaggacgatacctttcgcaggtcccttgggctgacgttttattatgtttttctatctgttccactaaggcttgcctttgctctactggtggcgatggcgctgaacaaaggtattcgagccctcggcatctaccggactgtatattacatcccttccctcttgggcggcagcgttgcgattgcaatcgtctggcggcaactctttgaggggaatggattggtcaatcagtttttaagctggtttggtatctcgggaccatcctggattgcgcatccagattatgtggtctacaccatcattacactatccgtgtggcaattcgggtctgccatggtcatctttcttgctggcctgaaacagatcccggcagacttatatgaagcgtccgatgtcgatggagcgggaaaaatacgtcaatttttcggaatcactctgcccatgctctcccccgttatcttttttaacctgatcatgagcatgatcaattcatttcaggcgtttacaccagcttacgtgatcggagatggccgcgggggtccactcgacgcaacgatgttttataccttgtatctgtatctgaaaggtttctcgttctttgatatgggttatgcttcagctctggcttggatcatgttggtcattatcggagtattcaccgcaatcgtctttgttacatcccgattttgggtgttctacggggataatcaggaggggaggtaatgcatatgccaatcaaacgacaactggttcaggccgggaggcatgccgccattatactcttcggtctgctgatgttatatccagtactatggttgattctcagttcatttaaaccgaaccatctcattttcaccagcggtagtctatttccaaccagcttcacgctggagcactatattaatggttggaaaggtctacagggcatctccttcggccgttttctcggcaactccgtgctgatctcggtcatgagtgtgctgggcaatgtgatctcctgttcccttgcagccttcgccttctccagattgaaatttagattcaaaggcctgtggttcagcatgatgttggtcacaattatgttgccttaccatgttactctggtgccccagtatattctctataatgagcttcaatggattaatacgtatttcccgctgattctgcctaagtggcttgcgcaggattccttcttcatcttgctcatggttcaattcatacgcggtataccgcgagagctggacgagagtgcgaccattgacggctgcgggcaatcacagatctttttccgaatcgtagtgcctctgctcgttccagcactgattacaacagcgatcttcaccttcctgtggagctgggatgactttttcagtcagatgatctatctgagcaaaattgatctgttcaccgtgcagttgggcattcgctctctctttgatccatcaggacaatcggattggggcgctttgctcgccatgtccaccctgtcactgcttcccgtgactatcatctttttactgtttcagcgatatttccttgagggcattgcgaccacaggtctgaagtaacaacacgtttctcatatcaatagacagggggatttatcatgttcaaacgtttcatgattggtatgatcacttcacttttgttatttgtaacagcttgctccggaaccgaccataccggtactaatgatgcaagcaatggtaatggtaatgataatggaactaccgagggcggacaggtcgaacttcgcatcatgtggtggggtgaccagaaacgggcagatattacgaatgaagccctcaagatctttcaggcaaaacatccgaatattaaaattgtaggagaatttgcaccttcctccggatatttcgacaaactgaatacccagttggcatcaggcacagcaccagatatctttttccttgggggaaatgtcgtggactatgctaaaaaagatgtcctgctcaatctggacccgtatgtaggcaacgaactgaatctggacggtatggatgaaaccatgatcgaatacggacgtctcgacgggaagctacaacatatttctgccggtgcgaacgcacggggaattgttgtgaatcaggcactctttgagaaggccggcgtgcctttgccagcttcggattgggactgggcggactatgccgccattagcaaagagttgtccgacaagctcggagacggtttctatggaacgtacaattttaccgtcgacgggatggatatttatctaaaacaaaggggtaaacaactgtatgacatgaaaaatggcacactcggattcgccaaggaagacattctggaatggttccagtattgggagaagacttcggcatccggcggtgtagtcacaccggaattgcaggtgtccaacccgcatgatgacaccagtaaatccctgttaatcacaggcaaagcagccatgactctactaccatccaaccaacttgctgcattccagagcttgacggaagatcctctggtgctactccctgtaccacgaggccctaagggaacgggggttgtatttgaatccagtcagggattatcgggttatgcaaataccaaacatccgaaggaagtagctatattaatggacttctggatacatgatcctgaagcagccaaaatcctcggtaatgaccgtggcgtgcccgttacggaagccaatcgaaatcttcttcaggaaggtgcaggccctgtggaggagattgtctataactatacaaactttgtctctgaagctacgaagactgaaccttttgacgtgagttacaaccctcctggatttgcagagttctctaagttagctcagacgacaaatcaggagatcggatttggacgaaaaagtgtggagcaagctgtctccgacttctataacgggaccgttcgtatttttgaatcgaatcaataagcagacgctgtgaggaggaacatatgacagaagagatattaaatcggctgcgcaacatttcgatgatggatcaagttcagccagttaaaccggaagatcagcagttattacaagaatggcatgcgtcgggtatccggtttgcggcatcgggcggacaactggaagctacgtattatgcagcggtggagaagttgcttgcttgtatcctgcccatgggagacaacgatcctattttacaagaaggtggcatctatctgggatgttggttagagagcacaggtaccatcaatgcggagctgctgtctcgcctgcttccatctgtgtccgaaacaacgtacctcgcatttgccaagcagcaaagagatgatggattgctcccgtataaactcacggcaaacggaccctctttccggcaaatccagttggtcactccgctggcacgcagtgtatggaaccactatcagcttcatggcaagcactcgtctttcctgaacacgatgtataaggctatggttcgttacgatgagtggattgcccacaaccgtaatacccgagggaccggctgtgtagaggccttcagtacgtttgacaccggacatgacttatccccgcgtttctggcatgttccggatacaccttatatgaatgatgcttctgcctatcatccgggttctccgattctgccttttctggcaccggatctgaccgccaatatctattgtcagcgcatgtatctgtcccgtatggctgaagaactgggagtatcgggaacggattggaaagcaaaagccgagtctagcctggaaagtcttttccattattgttacgacgaacaggatatgttcttctatgatcgggatcgtaatgacgaattggtcagagtccaatctgatgtgttgctccgcgtgatggcatgcgaggtgggcgaccgtgaattgttcgataacctactgcgtcggtacctgttgaatacaagcaagtttttcgctaaatacccgtttacatcgatttcaatggatgatcccagatttgatcccttttcctcctataacagctggggaggggcatccaatttcctgagtctgattcgggcgccacacgcattcgagtatcatcatcgatatgtggagctaacctgggtaatgcagcctatcttgtccgccctatccaaagataagcgatttggtcaggtactaagcccgtggaccggagaacaaggttttaccgagacgtactccccctccatcctctgcctcctcgattatgtggagcgattatgcggaattatgcctgttggatcgaatcagctctggtttaccggactgctccccatcgacatggatcatggtgagatcgtatctggcaacacggcttatagccgaaaagtcaacggagtaggttatgaattggtcaacacccctgatcgcatgacggtatatctggatggcaaggttcatctggatggcccgtcagggatacggcttgtaacggatcatagtggacatctggaggcagtcatcggaatgagcgtccgcaccgtcaagggagaacttttctatcaaggggagtgtatcccgattcagatcaaaggaaatgaaatgcagcgttatgctgatggaaatttgagcaccgagcgcgatattggcatcatctatcctacgtatcgttaattgtttgtatgcaaaaagcgcaagttgcggaggtttactgcccctgcacttgcgcttttacatttctttatttctacaccttccgttgccacgccggatgacgataaaattcaatggtatcaatataatttaccgtgaactgctgttccacatccgacaggttcaacagttttcggtcgatttgcttcatccccatgaccacatcatgccttagcaggtccatcgcaattttgcctacaaatccgccttccatctccttatgcttggcacggaactcttcattgtagatcagttcaggtgtgaatgccgcttcaacgaaagcattaacgagcgtaagctcattgccctcgatctgcactgccatataataattgccacgctcatccttaatgaggtctttatacatctctacgatcatgtgaatcactcctctattataaaagaaaccccgttagacttaacgaacatgggctatcaaacgtacaccttccgcccccgctccttcatatactaggtacaaatggcgaacggaggaatacttatgagctggcagcatctccatactggaaaaacacttcagcagcgtctggcagaactccaggggcaccttgcagaactgaatactccactctccgggttggaaccgggacgtattcgtcgtgtctatccaaggcagtttatcaaagtaaaccgacagttattcattccacttagtctgaattccattcgggtatttgatattcctcgaacacggcgaggcgtcagagtgggaatccgcacgacgttcccttccaagaatgcatttaacaatatcagacttgtgggcgtgggactggattatcttgaactccagggaaaaggcagagtcccttcccgtattttatttcctctctccagcgtcgagtcgatctatcggccaaccaccggaagaaaaaatctgaaacgaccttgtaagtggaagtaaagctggttcttttcgcaagccatacaatggttcccaaatgtctgcatacgggtgctcccttccaatatataattataacccatgcaaccacttatctgctgaagaatcattttatgtcaaaaagcggtgagaacagaactgcttctgtatctcaccgctcagccagttacggatcaagctgacccttcacatgtgtacatcagatgcctgtccatacgtccttggcataacgaccttcctgctgaagctgattaagccaatcctctgcttccttcgcggacttgccatgaatatcagcgtatgcctgctggagtgtagcttccacatcaggtgccatcttgctgccatcaccacagatatacagatgcgcaccctcttcaaacaaaggaatcagatgctgggcatcgtctctcatcagatgctgtacataacatttctcctccccgtctacacgggagaaggccgtatgaagcttcacaagcccttcttgctgggctgcttccaattcatttttgtacagataatcatgctcgggattccggcatccaaagtacaggtgagcttcgccaacctcttgaccttgttccttcaatacatgccttgcttgcaagaaacctcggaatggagcaacacctgtacccggccctaccatgatgacgggaacctttgcatcttccggcagttggaacccggattccggtgtccgcgtgaacatcacgatcttgtcacccggtttcaggttagccagatagttggacgcaatacctttgtattctccctgtccactccatgccggggcacgtacaacactgaccgtaatactcgcttgatcgggctggacacgcggtgaactggaaatcgaataatatctggcttttaatgaaggcagtaattcaaggaaacgctcgaacggcagttcacatgcctcatatttcaccagataatccagcatggagatccgtttgttccgaacttcatccatatacacagattcatcaagcagcgcttcaagttccttcttatgcggtggacatacggtatatgctgccatttctctcaactgcgcacgagttgccgcctcctgaagctcaacgctatgactgagcagatcatacaggttcaccggttgatgcagcggcagatgcgcggcactgcgaccggatgcatccagaacgagatgctccgttccggtgaatccataacgacgaagtacgcgttccaccagctccggtgggttctgcggcagaatgcccaggtgatccccttccctgtaggttatgccttctggcaatttgatctccaggtgacgtgtgcttcgttcactgcccgcgtcgtgaagctccctgttctcaagtacttctgccacatgtgcatcatacgtatccgcaagcggtgttacggcgagcccactgacaaactgtacagatagtgagctgcgttcactattggagcttgtgttcagtttcagtcccatcgttcgtgcgagatccggccataattgctctgtccaatcccccacctgtttctcaaaatctccgctagcatctgactcacccagtggtgataaccgctctgctcctctggaagataactgttcatctattaaacgcggaatacgctgataggtgctggcccagttgtggtcaccgcatccaagaacggcgaaacacacacctttgaattcattcgcatctgcatgttcgatccactcgacaaacatcttggcattacttggcggctgaccgttataggatgcactgacaataatgacggcaccctcctttggcagtttgccaacacgatcatccagcgtagcgacctcactccggaaaccctgatatctggcggtatccgcaatttcacgtgcaatgccttcagcggtacccagattggaaccgtatagaacaagcatcggtgtgtggtgggcattggctgcatccggctccgttcttttggcaactggctttggttcttctaccgctacacccggaacggccatgactggctgcccgccacgcgcacgtacacgaattgtgaagttatccggtttgagtgtcagcgtttctttcacctttaactgataatcagaatgatctatgaagtcaaaatgcttcaacaccatgcccagtaccagcgttgcttcctgaagtgcaaactgctgaccaatacaggcccgttgaccgttaccaaaaggtttataggcatcatgcggcactttgctcggatcttcgaaccgttccgggcggaattcctctacgtcgtctccccaggcttcgcggtcacgatgtagcttgggaataagtacactgacactgtctcctttttgcaaaggatattgacccgcaagtaccgtgtcctcttttgcatacagggaaaatgccggggccgtaggccataaccgcagtgcttcattcaaaaccatgcgaacatacttcagattgcgaacctggttgtacgtgggaaccggatctttcagaatctgatccacctcagcttgtgctttagccagcgtatccggattcttcatcagataataaacggcgaaggataacagtccacttgtggtctcatgtccagcaatcaggaatgtaataatctgataacggatgttctcatcatccagcgtttctcctgtttccgggtccttgccgctgagcatgtgggacaacagatcatctgcgccttcctgcggtttctctttgcgctcggcaataatgtgatccaccaaagagaacatggaacggatatcctgttcaaactgtttctttttggtgatcatcagcttgtcttgcagacgcagtcgctgcaatgaactcatggattcatccaacgcacgaaccatactcgtaatgaatggatgtggttcttcccgatagaagctgttaaaccgatagttgaacccacacaggccaatcgtgtcgagcgtaagacgtgtcatatcatccggaacgttaaccgtctcatccgggttcaatcgtgaccatttctgaaccagctgcacagccagatcaatcattttgttgtgatatccctgcatcgcacgttgactgaaacttggcagcagtacgttatgggcttttttccaattcggttcttcggtccaactcgtaaagagtccatctcctgcaaaagcacgaacctttgcaaggggtgcccacacacgtttgtcgaatttggattcatccgttacctcggcgaccagttcgtgaccggaaatatacaattcacttcgtccggggtactccatacgaaagatcggtccgtattcttcagcaagtttcaccaaagattgtacgggctcttcaaagttcaattgcggcaaattgcccagtgggccaaatgtttttggttgaggcactgaaattggtggcatgacactcactccttctttccaagttaagagttctacaactaaaaataatgacttgatttacagactcgattacacttactcttcagatcaacagattcaagttattttttgcacattttcatatttcatccagataacgataaaaccattcaaagaactaactgaccgaaatggtatattggtcatttttaatcaaaaaaaatggaggacttcgttatcttcttttaccctaacatttccagttctaatcttcaacagtcccaaagtcataggacctcaggacagggattaaggtatacttatgatttcttcaacaaattctgaataactgactccatctctaatggagctactgtcgtttcataacggccatggacgttcccactgcgatcaatcaggaatttggtgaaattccatttgatgccgtcaccttgatacaattctggatgcttctccttcacaaaggtgtccatccactgtccttccttcctgttcagatcataaccttgaaatggcgcttcttcaatcagataacggaacaacggatgcatcgatcgcccaacgacctcaattttctccaagatcggaaaggatatctgaaactgacttctgcaatactcggctacctcagtgttattcccaggttctttgtcgttaaactggttgcatggaaacgccagaatctccagcccctgatcaccatatttctcatacatctgctgaagttcactgaattgccgggagtagctacaccgacttgctgtattcacaataagcagaaccttccctttaaaagcagaaaaatcaccgttgtgtccatccataaacggaacttggtaagaaaatatactcatctgtattcatcctcctctttctcttttgtatctcatatgaattctctcttgaaatggattatacacctccattattaataggtgaaatatataattaatataattttaatagcttttaactataaatcgtgaacaaaaaactgccctcagcagtcaaatactgcatctcggacagttatcaaaatcatgatgtgccatcacactcaacacaccgttaacccataattaaaccatatacaatgcctggtccgtgaacgccaatggttaaatcattttcaatatcggaagatcggcttggccctgaaataaagtggatgcctgccggaagattctctcttcccgcttcgtcaaatcgatccagcgtctcacccagtctggtgtacagtcgatctactggaataatgatgatgagtaccgtaggcaagagactgactgaacgacctttttccggtgaagaaagcacagtgaccgagcctgtgtatgctgttgcataatccgccataaccacaccgatatccgcctcagctgcccgagccttccaattctcatcagcctgactattccagactgagatctgcacatcgggaagctgctcttccaatccgagatcctgtaacgcctgttcattctgacgaatgatatacctggcactcagttcatgagatttgttggctataaattgagatacttcttccatgttctgaacccgggcgatgtgtgcgcctacactcacaaagttatccgtaaatgcttgaatacgcttctcttcatcccattccagttcagtccaaaagtcgggtgctccccgaaagggttgggtcggtgcatggcgttgccttggtcttctcaatttcgaagcaatgtcattcatgaactgctcctgtttctcaatggacttcttctccaattgtgcaagccattgctgatgttcagtgaccatgcttagtaccctccccttcttctcgctcacgaataatctgctccatacggctgcgaacggaagaatccatggccggttgctcctggttcagttcctgatccagcttgttccattgttgccggaaggatttcttggcgagacttggggcaacccgataattgttccagcctttaagtggacccaatttgagagaaatgccgttgttacgcacaactgccttctgcccgatctgtccgagacgtatggccgcactgaaacgtttggaattggaaacaacggcggcaaatcccttcatgcccatactttccattttgtttccatgaccgtcttccactttacgcctgcgtaaataaacgagcatatcatgcaatggaattttaactggacatgcttcataacaggctccgcacagacttgaagcacccgcaatatcgttccattcatcaatgttgccattgagtgcaggagtcagtactgcgccaatcggaccactataggtgccgccataggcatgacctccaatatgacgatataccgggcaagcattcagacaagcaccgcaacgaatacaattcagcaactcctggaattcgggatcaccgagctgaagggatcgaccgttatccacgataataatgtgcatttcatccggcccatccgcatccgctgtacggcgaggacctgtgatgcctgacatgtacatcgttaatttctgacctgttgcggagcgtggcaacaaggttgccatgacctccagatccgtccacgacgggatgatccgctccatgcccatcagtgtaatctgcgtttttggaacagtggataccatacgggcattgccttcattttcgaacaaaaccatggaacccgtctctgcaattgcaaaattgcagccggtcatgccgatatctgcttcaaggaatttctcgcgcagctttttgcgaacaaatccagcaagtaccgttgtgtccggctccagaatttcacccgcttccttggataacaactctgcaatctggtagcggttcttatggatcgctggaatgacaatatgagatggggcttcgcctgccaactgaatgatgtattcacccagatcggtctcaatggcttcaatgcccgccgactccagcacatgattgagatgtacttcttccgacaccatcgatttggacttcaccaccgtagaagcttgcttatgcgccgcaatatccagcgcaattgccgctgcttccaccgatgtatctgcaaaatgaatatgaaccccgttcgcacgagcgttattcacaaattcattcagataataatccagatacgcaatcgtatgcaggcgaatctgacggccacgctcccgccattcatcccaattcccatgttcttctgaggcagacttctttccgttacgcaatcgttctgtcgtgaatttgaccgctttacgcagaaaatcatcgttcaaggccagtccggcacgttctttgaccgtagtatccataactcccggttggctcatcctgttcgcaccccctcatacagtagttccgccagatgcatcacacgcaccggttcattccgataacgcagattacctgcgatattcatcagacaggccatgtccagccccaccaatacttcggcttgcgtctctttgacatgatcaaccttctccgtcaccatcgctcctgaaatatcggacattttgatggcaaacgtgcccccgaacccgcagcaatcctcagcaaatgggagcggaaccaattccagaccttttacttgagagagtagcgccatcggctcatccttcacaccaagcagacggctgccatgacaggatggatgataggttactttgtgcggaaaatgtgcgcccagatcggttatcccgagtacctgaacgaggaattgagtaaactcataagctttggcttccaatcgttttgccttctccaaccatactggttcatccgcgaacagctcgggataatgatgaatcatatacgtacacgatcccgaaggacataccacaaaatcactgtcgtcaaacgcttcaagaatcgttttggccgctacccgagtctcatcccagtacccgctattgtaggaaggctgaccgcagcaggtctgcaccggcgggaaatccagccgaacgccatgagcggcgagcaatctgaccatggcttcccccactcggggatagatggcatcgctgaggcaggtaatgaataaggagaccttcataattacacgctcctattaactgattagtagataaattgactaagaatatttacactggacactccgtttcgtgtaaatgtttagttcaatttatatagataaaatccaaaagattaaaccgtgatgataccaatatcgtatccgctcaaacgttctgtctgttcagcctccaatggctgatcggtaacgatcatatggactgcatttaacccggatactcgggcaaaagcacggacaccaaatttactggcatctgcaagtaagatgacctgatcggatatgccaaccatcttctgcttcagccttgcctggagttcattggattcactgattcctccaccttcgagatgtacacctttgcacgacataaacattttatccacgtgatacgtttccaaagaacgctccgccagcggcccaacaaaagataacgagcgcgatgccagctggccccctgttgagatgacctcaaccttgtcacggttgctgagttcagtagcgatttggatcgagttggttaagaccgtcagcggaaaatccggcatattcgctgccatataacctgccgttgtgctcgcatccaacagaatgcgatcacccggattaatcatcgccagagccgcttgtgcaatccgttttttctcttccgcatgggttgtctccctgatccggtaagggatctccggttgatcttccttcacactcactgcaccaccgtgagaccggcgcagtcgtcctgcctgttccagccgatccagatcccgccggatcgtttcctccgtcacccggcagcgctcactaagctcggatacacgcatactgccctttacattcaccatctccacaatccggtcataccgctcggctgccagcatgttacacctcactccccgcttgtgaattagatgaagccgtcacacgcagaaatctgccgtaagcatcttcccagattgatccgtcctgcggctcatacacagttaccggaaatgaatcacgaatggccttacgagcttcccagatatctttaaaagctccgctcgccatccattgcacagccatattcccgatggcacttccctctgctggacctgcccataccggcttaccaatggaatttgcagtccactgacataacaggcggttctggatgcctccaccgaccatatgcaatccgttgaacgtctgacccgacaattgctccgtccattccagaactcttctatacttcaatgccagactctccagaattgcccgggcaatagccccctgatcctctggtaccacttgccctgtatcacggcaatactggcgtattcgggtcgtcatatcccctgctggcatgaacagttcatcatccggatcaaacaaactggcaaatggaggtgcctgttcagcctttgctaataacgcatcatagctaattccctgcccttggcggtcccactcccgcatgctttcctgcaaaatccataagcccataatgttcttcagcagacggaatgttccgcccgccccgccttcattcgtgaagttcaaggccagactctcttcactaattgccggatgatctatctccgtacccatcagggaccaggttccacaactcagataagcaaatgaacgttccgttgcaggaacagctacaacagctgaacccgtatcatgctccgcaacagcgatcacagggatcggggacaatcccagatcgttacagatactgcttcgcaattgtccaacacgggtacctggcagcacggcttcaccaaacaatttctccgaaatacgaatatgcgccagcaactcactatcccactgccccgctgatggattgtataattgtgttgtggttgcattggtgaactcattcaccgcttcccctgtcaggaaataacgtagcaaatccggaatcatgagaaaacgctctgcttcatgaagtaacggggaaccgctgcgttgaagcgttgccaattgatacagggtattaaagctaagaaactgaatccctgtacgttcgaagattcgctgagagctcagctcttggcgtacctgatccatcatgccgttaaactgtgtatcacggtaatgatacgggttaccaagcaactcaccattactgccaagcaaaccaaaatcaacgccccaggaatcgatccccaggctctctggcttttctccctgctgtttcaccaaggtaagcccctgcaacaattcatgatgcaatcgcagaatatcccagtgcatccgctcgccaaccttcactggttcattcttgaaccgatgaatttcgcttgtttcgatcccacgatcattcagatgtcccagtaacgctctcccgctcccagcgcccaaatcataagccagcacactcaccgcgcttcaccaacctttcgaacccatcctattttccaaacggtatcccttgattcagtccgtaaccctgtactttattctgtatttattgtttgtttgtttttgtttaatactgtttaactttattttacgagtatatcaccaatgtaagcgtttgaatacccttcagtttttctttcttttgggtataccaaaaacgactctctcccacctgggaggagccgcatttctttttttacgtataaaattgacctttgcttacccccgactggggttgtacatctctctcaaaatgcttgaaacgtgtcccctgatacgtcagcatccctcgatcattttccaccatcatgccataatggtttccaccaacgatcagttcagtgcgctccccattgtcgaattcaaatgtaacataataccgggtagtcgcactgctatcgccgctgccacctgaaacttccgttcgtttggctaccaccgttgagtgcagggttaacaaggccgctgcgttattcgatgaccaggtgcgtacccctgaaataataacaaaaacaataactcccgcaatgatgagaaatatgccgccaatgaaaatcgaagcaaatgcattcattgtagcaaactcattaaatcccgaaaaaaaaccaccctgattgccttcaaaacctggtactccattcatgtcgtcaaacacaccaaagccgtctacgcttaatcggcccatcgatgaggacacgcttgttaacgccattcatcatcgttcctttccccttgcaaaaataagatgcaccgcccccacgcaaggaaggcggtgcatgcagacaacccgttctgccttgtccatatactatatgaaccagatcaggaatacagacgttcaagttcgtcgaccagactgccgacataagcaaccgcagagcgaatcggctcaggtccggacatatccacacccgcaagcttcattaactcctgtggtgtgagacttccaccagctttgagtgcatcaagccagcgatctaccgcaggctgtccttcttcacgaatctgctgtgcagccgctgtggaagccgtcaagcctgccgcataggtatacggatatagtcccatataataatgaggctgtctcatccatgtgagcttggccccttcatcaattaccagatcaggtccccagaattcggaaaggatgtctcccttgagttgacttaacgtctttgccgtaatgggctcatcattggttgcgcgtgcgtacaccctgcgctgtaattcaccttccagcagatgtgtaacgaagttatggtaatacgtgttcaacaattgcaaaatgacccagcgacgcattctcggattatcggaacgcttcaatagatgatcggccagcagcatttcattcatcgtcgatggtgcctcaatgaaataaagagatggccgtgtattcgtgagacgttggtaacgtcccgcaagcatgaagtggcccgcatgccccacttcatgggcaagtgtaaatgctccgcgcatattgtttgcccatgaaattaagatataggagtgtgaaccatatatagaggagcaaaatgcccctgtggatttgcctgcattatctgcgtaatccacccagcgatcactgaatgcgcgctctacgatctcgccgtactccggcccaagcacatcaagtgcttctcgtatgagtatgcacgcctcatcatatgtaatggcagggctaaattcaggatcaagcggcgccttcagatcacaaaacatcagtttgtccagacccagttcacgtttcttgagagccgccagtctgcgcatatgaggtgcgagttcctgctggataatatccagaatattattgtacatctctttgctcacttgttgtgggctgagaagcatatctgtaacatcgtcgtaaccacgcagcctggataaaacaacctgtttcttcacttcggttgcataaccttctgcgaacgtatttttgtaatcatttaatgtcgagctgaatgcagcataagcagaacggcgcagctttgtatcagacgacatctcataattattttcatagaatgaccaggacagtggacgattattgtcctctccatcaagagcatcgtcaaacgtcatgtctgccagtttaccgcgcagatagatacggtatggcgaatccagtacctctcctaatgaagcgagtaccttctcggtctcaggcgtaagccgatgtactttttctcgaatcaaacgctccaaactgcgcgcatacggctccaattccggaagctcttcaagataacgctcaactgttccctccggcagatcaacgatctccgaattgacaaaagacaaggacgaagacagatttgataggatatctcctgccttggctgaattctcaatattaaccggattggtgctgtcctctgactgcttcagtcgagcataagacgccgtcttgctgattcgctcctgcaaagcttcacgcgcatccagacaagccagtaattgttcagcgccttcgcccagacgtcctttgaacgtttcgatctgggcagcagcctgaggaagtgatcgaagctcctgctcccactctacatcggttacaaacaagtctctcagatcccaagtggtttctgtgtttacctcagcacgtgtacgtattttttccatctgtatatgtcatcctccttgcatttccaatatctctcatcgtatcatattccagttcaagggagtatagattggactaaagattattctcacttaccacttcgatgacagaacaaccttccgatcgctgttatccccagattttttgattcccctttttcaaaggtaaaaatccggtgataaaggcgcacgcttcgcttcttaagtctatttctgcccgctgcgtttggagtaaactattgatccactgtccaaaatttaaaagtaactaaaaaaaccgctggtttatggaagtatccatttacctggcggttcattatagaacttacttatttagctttctttccagattacattttcgccgtaatttttaccccagttatacattgcgtgcaggacgggcatcaggctttgaccgtgatctgtcaacgtatattccacccgaggtggtacctctgcatacaccttgcgttcaatcagtttgtcttcctccagctcacgaagctggttggtcagcatcttctgggtaatatgagggattaggcgtttcagctcactgaaacgtttggtgccttccaggcccaagtgccacaaaataatcagtttccacttgccaccgatcaccgcaagggtcaattccttctcacagttgatttctttaagattaatccgttccttcacttcggacgccatggctccgagccccctcatcttcaatcttatatcgcgtatattacgcatatcacggggacacttcacacgaggtaagttttccgctccatgcatgatgtaataagtacattcattcgatacagctatctaataattctactacagcctggtcgggatgcaaagtttaactgtaaatcacggataaaacctatacagatgaatgattatgtatcgcagaaaagaccagaacccttcataatcaaaggattccggtctttcatctattcactattccaggttcgcgtggcggccaaacatatccgctccggtcatacccttcatttccatcatcgtaaggatgagagcatccatgccgattaacagtccttgttcgaacaacgagcccatcggctgaatggttactgccgctccggaagttgctgtgtcctctttggctgaagccgggagacgcactaccgtagttgccagtttcccaatcgtggactctggcttaattgtaatgagacctacaggtgcaccagcttgactagccttttgagccatggctaccagactgcctgtctctcctgagccagagcacagcaagaggaaatctttcgagctgatcccaggtgttacggtctcgcccaccacatatacacgaagccccatctgcatcagtctcatggcaaaagcctttcccataagtcctgaccggcctgctcctgctacaaaaatctgttccgcagccagaatgtgctcagccatcgcttgcatctctgcatcatcgatctggcttagcgtacgttccagctccttcaagatgtcagctgcgtactgtgttttgctcatctgcttacccttgtttaacgagacgttgcatttcagctgcaactgccgctttgtctgcttgtcctgtgataccgccgcctacaataaccagatccggttgtgctttgattacttctggcaatgtttccagcttgattccaccagcgacagccgttttagcatttttcacagcagctttgatcgtttgcagatcttcgaacgggctttgtccttcagcttgcaggtcataacctgtgtgtacacagatgtaatctacgccaagcgcatcaatttcacgagcacgttgttcaaggttaggcacgttgatcatgtccacaagaacttgtttgttttgttttttcgcttctgctactgcacctttgatcgtactgtcattggttgccccaagcacagtgattagatccgcaccagcttcagctgctttcatgatttcataaccaccagcatccatgattttaaggtctgcaagaacttgcagattagggaatgcttctttcattgcttttaccgcgtgcaaaccttcattaataacgattggagtaccaatctcaacgatatcaatatattgttcaacctctttaaccagtgcgataccttcagggatatttaccaagtcaagcgccaattgcaatttcatcatttatttctcctttgttgttcaagtatgattcgttcctgtaaaaataataatcagatatttagcctgcaccaattggtctgttcagatgcatgcagtgtttgttttggctactcactcattgtagaccctgactatccattcaggaagtacgcactttgaagtggggtagttacttgggggatactattgataattattcgttgttaggtgaacctatatagaattaatcctctattccaatccacatgcttacagcagaacagtagcctaatcatccaattagatattcaagacaaaagaccccgccacatggcagggtctttatctttatcgtttcattttcaatccagccaaagctggtttagaaatttatcattttacagatatacaggtttcacgcataccggcttggatacacctgtgctgtgaccagtgtatttcagacgtccgctctcctgatctaccgtgaatgtcacgaggttgttcgtatcgcggttagctgcaatcagcaatttgccgttaggtgtcagcgcaaagtgacgcgggtgctcaccttctgcagatacatgctcaaccagtgtcaggtgacctttgtctgcatctactgcaaatacaacgatgctgtcatgtccacggttagaaccatatacataacgtccatcattggaaaccgtgatttcggctgttgtattctctttgccatcatatccatcaggcagtgtggatactgtagacaattcagtcaacgtgcccgctgctgcatcatatttgaacgaagtaatggaagaatccacttcattgataacataagcgaattcaccattcgggtggaatgccaagtgacgtgggcctgctcccggatgtgttttggtttcactgtgcagcacaagttcattcttgtctgcatcaatggaatagatcgcgatgttatctgcgcccagatcctgtaccatcatgtatttaccatccgggctgaagaatgcggagtgaacatgtggcttgtcctgacgttcaggatgcgcaccttgtccttcatgtttcttctcgtccagaagcgctccaacttcaccgttatccgtcaaggcttgcagtcctaccagaccaccgtggtagctggacaggatcaagtatttaccggaagggtcacgctggatatgacatggtggagctgaaatggagttattccggttcagcaacgttaattttcctgtagaaggatcaatgctcagagctaccgcttcagacattttgttgccttcagctgacgctgtttcaccaatcgcatacagtttgttaccttcagcatccacgttgacaaacgttgggtttttcacgcccgcgatgccgtcaagctttgacaagctgcctgtatcctcattcaattcatatgcataaatgccctcattttccgcttcggcgtaagagccggcaagtacgagcaagcgttttgattcactcattacagtttcctcctctatgtgtatgtaatcttgttgcacctcttctataataaatctgccatatcaaaatagcaatccgctgtcgctgcccatcagggaaatccttagttaagcaaggcgattactacacatcatcatactgaaatccattcatatgagatgcatcttctgctatgataagataggtttttcatccagaagggactgaattgcattgcttcactcatttttactcaccttataccatgtgttcttgccgatatcacttcccgtgatcggaggtattctgttaaaacgcttcaagaattgggatacccggtcgctctcgaccttttccctttatattttgagccctgctctcatcttcaatacattgctgcatgcagagattacctggacggacgtcaccagcacgttctggttctctattattaatctgattgctctgtgggccctcgccgaactgttgagccgggtgttccgtctgggtgcaagcgaaaaagcgggtctcaccctcgtctccacgtttacgaactgcgtgaattacgggctcccgcttgtactgcttgcctttggtcagcttggactggacaaggcttcggtctacgtcattggacagatgatcattgttaatacggtaggtatcttttttgccgcaagatcccaattcacggtaaaagatgcgattctgtccgttttccgcatgccatccatctatgctgctggcatcgccattatgctacgtgcgtccaatctgagcctgcctgacgcactcgatggaggcatctccatgatggccgcgggttactctcctgtcgttctcgccattctgggagcacagatgctcagaccaaaaggtgctacagtgccctggctgcccaatgtacgccgagccttctggaccggacttgtggtccgtctcgcagctgcgcccatcctctcctgggtgattctgaccgcgcttcaggtcgagggtacgttgttcagtgtgctgctgatcctcgcatcgatgccgaccgcagtgaacgccgttattttggctgaacagttcaatgcttctccgcagtttgtatcccgttgcatcctgtggacaaccgctgcatccatgttgatgctgccgattatgattgtgatggcttcctgattagtaccggaggcgacaccgacgctagatccgcttgtcggcgtttctccaaccggcgttcataacgccggttgagcgctctgacgtagaagaattttacgacaaagtacgaaatcacacccagaatgacaccaaacacggacatgcctgccagaatatccagtccaccaagcaacaattcactcacggccgaccagttcccgcgaaacagctccatgaatgcactctcatgtaccggtccttgtcccatgctgtgagcaggtagaatccaggaaccaatctgcttcgcgagcggcatcagaatgataggcaaaaacgtaagttttccaatcacgttaccaacaatcgctgctggcatcgaacccccagacagtcgcacaattgggtagaatatgagatatatcagggatgcggtcgagatcacgatcagctccagtccgaaccctattgcaaatccggtggatactttatgagcacctccgggagcacgtaacaatttgaggaaattcagcttcatagcacgtgttaaacgtacccagaggttagtcttgcgcttctgtgtgttcataccgaatttctccttattttgtacaaatgacgacttgaatcgtctattcttcagtatatcacaccgcgttagctccagtgataacaatgactggctgtgtctccatctggacattacctgccaccgctcgggagatcatacaggaggattcagccttatgcgccaagcgctcagccttggtcagatccgcctcagaggcatctgcgctgagcacaatccgaggtctatgtacgatccgttcgtacgtaaatacgttattcgtaacatctaccgttgcttccgattcaagcgttaattcatccggcgtaatatccgaacgctccagcatcgctgccagcgtgatcaggtaacaggtggaggctgcacccagcagcatctcgtccgggttagttcccgtaccgggtccgcccatctcctgcggaatcgatatgaccgtttttaatccacctgcatcgattgttccctcactgttacgcccaccattccataccgctttcagatgaaaaggatgtttcatgacattcattcctttcttgtttacacacgtatacacgtaatattctgctcaatcaatgcgctaacgtgctcttcatctacaccctgatctgtaatcactttgcccacactgttcatctcagcaactctggtaaaagcctgtatgttaaacttgctggaatctgcaagtaaaatgacctcatccgcaatatggatcattttctgcttcaccaaggcctgtaattcattggattcactgatgcctttggtcagatgcactcctttgcaagacagaaatactttatccacatgataggcatcaagcgaacgttccgccagcggtcctacaaaagacaatgacttcgaagccagttgcccacctgtggcaatcacacgaatctgctccttgttactcagctctgcagcgaccttaattgagttggttaataccgtcagtggaatgtttggcaatcctgccgccatataccacgccgttgtacttgcatccagagcaatccggtcgccggattccaccattttcaccgcttcgcttgcaattctgcgcttctcttctgcatgcgctacagcccgttccggatacggaatctccgactgtaactcatccttgtatcttacgctgactgccccgccatgggaccgtctgagcctgcccgcctgttcgagcttgtccagatcacgacgaatcgtctcttccgtcaccccgcagcgctcactaagttcggtcacacgcatgctgccttgcgtatccacccattccactattttctcataccgttcagctacgagcatattccttcactccaaaccgttgattatccagttaatcctgttcatccatcataccacagagcgatgacaaggagaatttggaccatgtgcaaaaagagggagctttcgccccctccattccagttctgaagtgtatcttatttatcttctgccatagggaaccagcccggtgtgtggatgattgcattccacaacgcgtcagggataaccagacgttcctgatccgatttggtcagaatcgtctcaatatcttcttcccgtccgctctcgattttctcaacccaatccggttcaataatcagctcacgtccaatggcaagcagaggtactcccgtttgaagcgcctcagcggcctgatctgccgtatgaattgaacctacgccgataacaggcaatttgccgttcacacgatccaggatgaattccattctagaacgtgtatctgcttcgccacgtcttggcttggaccagaattcgttcagggaaacatgcaggtaatccaggtttttatctttaagcgcatccaccagtgcatacgtatcttccattgtgagtcccggtgtttccggttcttccggggagaaacggtaaccaatgatgaacggcagtttggtatgttcggcaaccactttctgaatctcatccactacagcaagtgggaatgtcagacgtttctcgacactaccaccccaacggtcttcacgtcggttggaatgcggggagaagaattgttggatcagataaccattagcaccgtgaatctcaacaccatcaaagccggcttcgattgcacgacgtgtcgcttcaccaaagtctttgataatcgaagtaatctcggcatccgtcaactctcttggttcaggagagcccggacgctcacttgcaaccgtactaggagcaactacttgacccgcaggtacagcttgttcaggcgtcagacggcccgcatggaaaatttgcaatacagctacggagccctgttgtttcatggtatcagccagttttttcagaccaggaatgaagcggtcgtcatatacgccaaattgagcggggaaaccaatgcctgtctctgttacatgccctacagccgtaattgacatgcccgcaccaccggtgcgacgtgcataataagcaagttcagcgtcggatatcgtaccatcagcattcgaggacatatgagtcatgggagcgagcacgatacggtttttcagtgtaatgccagtcggtagtgaaacttgttcaaacatctggttaaactttggattcattcgtggttccctcctgattataaatatctcttttaatagatatatgaatatatgcgttcgcttactgtaatgattatagttacgtttcactgcaattgcaacttttcattttctgaaaggaaaaaaagagcagagtgtctccagactctcagccctcttcattttcttcacatcttccaaaggatactcagaaactccgaacgtaagccagcttctgatccatctcttccacgcattcgtaacagtcgtgttcatcgttggcgaccattggtgttaccggatacagattcatctctgtactgttatacgatttcagtagcggtaacaactgagtcactcgtgtattggcaggatcaagccaggtgttgatctcttcttcggaaaggatcgctggcattttactgccaaactcgcgtgtaaccatgtttgcgcctgtcataagcatcgtgcaggtacgaagcggctctttccgtgtatctctccacacctcatataacccagcaatcccgaacaggccacgatccggcataacaacacgaaccgcataactttttttgccctcttgccgccagtaatataatccattgcagggaataacgcagcgcttggtctctaccagtttgtaataggaaggattctcatgcactgtcatgagatttgcgttaacggcatcacgcccccagaatggaatgaacccccaccggaactcatccaatacacgctcaccatcctgatgcaaaataatcggcgtatgctgggttgggctgatattgtatcggtttttgtaataatacatcactctctgaatcttgaaatgatctctgacatcgtccaaatcggctgccaatgaaaaacggttgcacatgttcaagcactacctttccctatgagaagttgaacgtattgtttgtaattttagggaaattattcatgaacattgaacagaaaatgacttattttgacaccattagggtcggatcaagatatatttcatgtttttcacgacaaaaacaacgacctcggactcatttcaactccaatattacttgttactataatagagaataaaatacatttattggaggttttaagtatgaaaaggaagtttttgatgagcatcatgttgttctcagcgattgcgatgtttggtagtaccatctatgcggcaacctttctaacctacggttaccccagcaccaccattcccattcgtacgtataattacgccgccgcatggcagactcccatggacacttcccttaccaactggaacaatgcaggtgccaaagttaaattcaccaaaacaagtaactccccaaacaccatcaccgcaggaaacttcaataatacagcatatggtgtcaactacgcctccgtctccggcagtcaagttgtaagcttccgcatcgaactcaatgcatccacaatcacccctgacgcgaccaacttatccaacttcattcaaagcgtatttgtccacgaactcggacactccatctggctcggtgacaacccgacaacaagcagtccttccattatgtcttactcccgcaaccgcaattccatgacccaaccccaaacttttgatatcaataacgtaaaatccaagtactaatccgctacgaacttattccaaaaatccaaggaggattcctgtccatgaacaaaaatcgagtattaacgctgcttctctcttccattttcattttatctgctgttggatgttcttctgttacacctaccgcgtccccatccgatgcacccatgaccattattgcttctgaagattacccgagttatgccagcattggtgacctgtccgagagagcaaataccattgtgaaaggcagtgttgttgagactcgtgtggaagctttaaacgatattgtacaagttactgatgctgccaatgaaaacgagttaaaccctgcgtccgatccgggcggagagccagcttcttttgaaaaaatctatacgatccacacgattcaggtcgctgaatcctataaaggcggttacactgccggggaaaaacttgaagtgaagcaacttggcggacaacttggcaacaccgagattattaatgatgacaacctcaagctgattcctaccaaagactatgtactcttcctggaaacgtatgaagacacccctgccagcctgctcaactccgttcaaagtctctacgtgatcaaacctgaggccaagtcgaatcagccaggtcagcaacaatcacagtcagaagtcattgtgagcgcaaaccccgagaatgacctcacactgcaactggaggatctgcaagaaattcagaacgaacaaaagagcgaataaactctttatacggtaatcacaccacactgttatttcatctccgtacaggcagctaatcccctctactgttcagtcctacataagaaaatgaaaaccgtgctgctcagcaaactgggcggcacggttttttgaagttccttatttagacggtgtattaagtccaataatccattcagccagatcctgtgtctgtttcaacaaggcaatagggtcacggaaccaggattgttcttccgtccatatgtacacttttccatttttgatagcaggcaatgaaccccagatcggatctgcctgaaggtctttcaactgagacttgctggtcagcacaatgtaatctccagcgtatttggagagcagttctatggagaattcatgataggcgccctgcatcaactcggatggaatgttctttggtgcttgcaaaccaagcaattcgtagatgttacgccctccccggcccgactgattgccaaaaatgaagacttggcgatcatattcctgcataacggagaatgtagcatcagctggaacaacactctgcacctcctgcttgattttggcaatctcctcatcaaaatcagccagccacttctctgcttccgcttctttgccaaggactttaccgaaatagttcacttcgtccttgagtgtcggaaaagtgatggatgctatcgaaacggtcggagcaatcttgctatatttctcataagccgccttgtccggattcaatgtaataatgagatcaggttccagctccatcaattgttcaacggaatcccctatcgtttcaagaccatccatgtgaccttccagataaggactgttcattagaaattggcctccaccaatcggtttgacaccaagagcaagcaccgttcccagataatctatggcagcaactcgctcgggatgtgcaggaatctctacctcaccaaaggtcgtatttaccatttgggtctccacgactgccggttgttcgggttcagccgcaacttcggatgtttctgccccctgctgggctgttccacaagcactcaatgtgagtacaagcgcaagcgacatgatcgctgatttaaaatggttaaacatgttgatttcctcatctcccttatattgataatgattatcatcatcaattaaaggataacgttcatcccctcctgttacaatggattgatttgttgcatttaatgtactttttgaaactgatttcgagttttcctgctgcttcaaccgatattgccctggtgtgattccagtctcttttttgaatatacgattgaaataaaacgggtccatataacccacatacgcagcaatctcctgtaatgaagcttctgtggacgcaagcagactccttgcctcacccattcgtaaccgaatcacatattctgtaggtgtacatcccgtctgttccttgaatttgcgtgataaatattgcggactgtaactcaaggattgggcaagcaaatcaagtgagatggattcccggtaatgagctttgatatatcgcaaaacctgatcggtaagcgaaggctgttcaaattcgttagacatgcgactccgctgtaacaatacaagctgtaccagttgaaaaaaatacactttaacctgaattttgcccactcgctcctgccctgaccagcattcatgtatattccgcacaagctcacgcagctcaagtgtatgatccggcactgtcgcccaggactcttcaaacggattacgctggttcaacatcattcggtactccacaagcacattggagggcaaggttgatttgtacaaaatcagatgtacctccataacccctgtcgcttcaagtgtcagacgtcttccttttcccccatgcaacagcaagaactgatttgtagtccatacctcttcatccagccagacctgacccctgccttgaacatacacaaatgcactggttggtaacacataattgcgtatgaactcgtgtgttgcgagtgatataagacgcacatcaagcacgcgaacctgaacctgatcccacagcttgatgtcattctgaattcccatataaactccctctcctaagcgatcaaacacacacaataccttggcattgtgactaaaaacccacctataattgataatgattatcaattataacaatgatgcaaccatctttgaagcctaccttcgtttttgttagatgccgcaaaataaaaaacggtcgaaatccctcatagagagatctcaaccattctaaaattatggccttattatgttttgataaagtcagctgcccttctctactcgacaaaagacaataaatatccgtattgttcttcctccatcttgtctagcggaataaagcggatcgatgcactgttaatgcagtaacgtttgccaccacgatcttcgggaccatcatcgaacacatgcccgaggtggatgtcacctgcccggcttcgtacctccgtgcggtccataccaaagctcgtatccgttgtataggtaacaacctcaggtacaatcggttttgtaaaactcggccacccgcaaccggaatcatacttatctcgactggtgaataacggctctcccgttgcaatatccacatacagaccgggctcctcattatcccagtattcgttactgaacgcatgctccgtatcattgtttaccgtgaccgcatactgttcgtctgttaaacgttcctttaattgttcatctgttggacgtggataatgagcgggatcaattccaatctccaggtcatccaggacagtcatatcaatgtgacaatatccgttcggatttttttccaaataatcctgatggtactcctccgccaaataataattctgcagaggcattacttccgttacaatgggttggtcatatttttcttgctctgcctctacagcctgctcgataattttggcatcttcaggcaacgtataatatatgccagtccgatactgaatgccacgatcattgccctgcttattcaagctggtaggatcaataactcgaaaataagattcaagcaatttctgcaaagatacttgctgcggatcatattttacatgaacagtctccgcaaacccctggtccccgcgtataacatcctcataggttggattctttccttcaccgttggcataaccggaagtcacatcctgaacccccggaatacgagccatatatgcctccacaccccagaaacagcctcctgccaagtacaggttactcaggttttcctcggagacactcgatgccttgacaggttgagtggatatcgaagatgaagctgaatggctctcagccctgtttccacaagcagacacaactatcgctataacaaggaggcacaggcccagcagcgtccttttcatgacacttcctcctttctcacaaaatctcttgtaatgactccatgatctgttcattggatgcatgccctggctgcgatttcgttaaaataccatcagagccaatataaaaggaactaggatatgctcttacgccaaatttcttggcccatacacctttctcatccaaaagaacagttatattatcatacggctgttggtcaaaccattcggtaaacgcttgggaggatttctctcctttgtagtccggcgtcacaatcgtaatgacttgaaaatcattgttttgaccagccagattgttcaggtcttccaaacccgcaaggcagatggaacaccaggaagcccagtatttcacatacactttcttgccttgaacatcagaaagtccaaccgtgtttcctttcagatcacgcaatgaaaattcaggagccgtctctcccttgttcatcatggttgacgaactcatatcggatgttgatgctggggctgatgatgaccccgtttgttttgattcagtttgctgtgatccacatgcgctcaagatcaacagggctccagcgaatacgattacagataccatccatttccgtgccgtcttcataccaaattcctccaatgattattgaaaccaggtcaccaagctgtttagtcggtctgtcattaacaatagtcccatgacaataagaatacagccggaagttattttgatgacgcccatgtacttgtataaacgacgtatccgcttcataacatattccgaaaaaacggacagaatcaggaaaggaatcgccaatccaagggtatacaggaacatgagaaacccgccatacagtggagagccttctcctgcggcgataccaagaatggccgccagcacaggcccgatacaaggcgtccagccaaaactaaacgttagacccaacaggaacgctccgacataccctccccgtttggcttgattgcttgacagcttcctctcccgttccagccaggatagccggatcaacccggtttgataaatcccaaaaagcaccacgatggctccgcagatcgcaataaacacaggacttgagatcaaattaccaaccatgccggaaccaaaaccgagtaaaacaaataccagggacagcccaagaacaaataaaaatgtccgaaaaacaagtgtggaccgcaaccgaaccgaatgggtgtcaggctgctgctgattcgtaccgttgaccatgcttccggatagataagacacgtataccgggatcagcggcagaatacatggcgcaaaaaacgataacaatcctgcaccaaaaacgccgaaaaggaaaactaaatcactggtcaagtcattcaccacctgaataaatactgcgtttgattaaccaaggttaacgactgacgtagatcggaagcgtgaaccagaagcaacttccttctccttttgtactctgaaccccgatctcgccaccatggagttccacaattgattgagcgatggcaaggccaagcccggcccccccattactcttgctgcgtgatttgtcaattcgataaaaacgttcaaatatacgcgaagtttcctccgcttcaatgccttccccttcatccgtaactgaaattcgtataaacggccccttttcttcggcagccagaatgatttttccttcaataggagagtattgaatggcattttgcagcaaattggaaaggacccgcttcatttgtgcaggcatcatgaccgcggctggtaatttatcgggcaaatctatttcaacgttcagcgttttctcggcgagatgaaacgaaaaactctccaacgtactgagcagcaactcatcgacgtgacaaggctgagggtcaaatacctccccttgcgcttccaagctggataattcaaacaaatcttgaataagccctcccaaacgcttcgtctcaagtcgtatcgtgttcaggtaacgttgaaaggtttctttatccttaatgacatcatcctccaacgcttcgacgaatgactgaatggatgccaagggagtccgtaaatcatgggaaacattggcgatcaactctcgtctggcggtttctgagtgatgcagatgatcaaagctttccttcagcttggaactcatttcattaaattgctgtgccagaagcttaaattcctgcgtaccgatgagagggacttccgtatggaaatccccttcggcaattcgtatagtctgctgtgtaatacgcgcaattgatttctctaatggcttagtcagcaaatattgaagaataaacgaaagtaagcctacccctgccgttatagccgataaccaatacaattgttcgatcgtaagcagcattttggaataactgatgaacaaacaaattaataatacgccaatgcctgtgagactggacaacaccaagtacgtgcgaagtttcatgaactgccacccgcaaacttgtagcctataccccaaactgttttaatatattttggctcagaaggattctgttcgatcttctctcgtaatctccgaacatgtacagtcaccgttgttgtatctccctcatagctaaaatcccaaatcttgcttaacatctggttacgggagaacacctgacccgggtgacttgccagcaaatacaacatctcaaactccgtaactgtcaattcaattgccttcccattgatgtgcacttcacgctttgtaaaatcaatggtaagcccttcataattgatcgtatattcagaagttgtaacaggtgatgcctgcgcagttcgcattctccgcaggattgccttcacacgcaaaacgagttctcttggactgaatggtttggtcagataatcatccgcccccatcgtcagtcccatcagacggtcctgttcctcaccccgggccgtcagcattacaatgggcacatcctcagtttgccgaatctcgttgcaaacttcccaaccattcttatgtggcatcatcaggtcgagcacaatcaagcttggcgtttggctgtgccacagctcaatagcctccaaaccgtccttggccgtcacgacaagataaccttcccgttccagatacctgcgacaaacgtccgtaatatttgtatcatcatcagcaaccagtacacattcattcaaacgaacccaccccatattccagaaaatacatttgagccaatcatatcatatggtgatggcgatgcttagcccttaaattacttcattcccatggctggcatcatgtattgtttaattactgactcagccgcatacgtattcccatcatggatgacaggcatcgatttcaagttaacttgcataccgtctaccatgatttttttcgatccaatccacaatttaatcgttttccccgcaggcatcatcgtttcttccatcatcatgtcgtctttcatcatcatgtcgtcttccatcatgttgtcgtcttccatcatgttgtcgtctttcatcatcttgtcatctttcatcttcatgtcgtcttccatcttcatgtcgtcttccatcatgttgtcgtctttcatcttcatgtcgtccattttgcccatatacatcaaagttacagatctgtccttgctgtcccacataatgctgtaatcatacattttcgccgcctgtctcaattgaacaagctccatgccatcctttttaatcgttttcatatctgcagcacttgccaatccagaaaaggccatagacatcatcaataccgctgctaccatcgcttttttgctcttatttgttttcatcattcttatcactctccattcgtttattacttacatggattacaataagcaagacagcttacgattctctaagcgaagtattacgaaaccattacgatatataaatggggtcaggtttcaataaaaaaacggttgaaatctctcttccgagagactccaaccgtttcttctaggtcaaacgaataaaatcaatcatggatcgaacctcgatcggtcccggatttgatatcacatcattagactgcaatccctctctggaagtgaactgcaccttcaccggaatgccaggaatcaagtcgaagaagttatctgagaagacaccctccacatccgaagatagccatacctgtttagcaagcacgtcactttccagtaccagatgaacgccgttctcatccgctcctccgcttacattgatgtttgcaggctgcagagcaaggtctttggacggtacaaaatagtgttcctgtacgatattcgcagcaccttcctgtttcagatccaggcgcagcagcgtgttagctgtatcatgaccttcaagccattccacgttacgtaatgacagcactcgatcacctgtattaggtgccaaggtcacgtcatgtgtttcatcacgatgcaccgttccatcgaacccgagcaaacgaatctgtaactgccctttaacaggttgtaattgatccgagatgatatatatatctgttgtatcttcttttgttccatctaccgataccaacacatcgctgaagctgcgtttcgcataatattgcaatgctttccaacgaccaaggtagtccatacctgcccatgaagccactggccagcagtcattcatttgccagtaaagtgtgcccatgcagaatggtttgcggcgacggtgcgcttcaatagctgtcttcattgcttccgcctgaagcacctggctcatatacaggaacgatgggaagtccttcgattcatgcatgtacatatccatgtactgtttgatcagacgattacctgccccattcttttgatgagccaacatgacttccgactccagagccagatcctcttcttccgcgtaagtgcgtactgacttgtactccgggaaagactggaatccgtattcactcatgaaacgacccacatgcacgttgtagttctcgaacggttctacattgtgccacacgccccagtagtggatatccccttcagctgtggatgggtgcgcatgttgcgtctcatcccctgtcagtgataccagtggtgaggaaggccagtaatccacacctggcgcatacgcttcaacgacttctggcagcagatcatggaagatggcttcgtaatcggcccagatgctttcacgctgctcggcagtaaattcctttttccaaccccagccaccattctcaacatagtgagcccaagccgaatcaatctcgttgttcccacaccagagtgcaatacttggatggttgcgcagacgtttcacattatcaatggcttcatgtcttacactgttcaggaacgcttcatctcctggatacatgctgcatgcaaacatgaagtcttgccataccaggattccgtattcatcacacagttcgtagaacacatcctcctcatagattccgccaccccacacgcgtagcatattcatattagactcagctgcggatacgatctcatgacgataacgttcatgagtaatttcagtgataaagctatcatttggaatgtgattggcccctttggcaaagaccgcaacaccatttagttcaaagtaaaaggatgctcctgcttcatctttgtcacgtaccagccgaatggaacgaagcccagtcttcactgtagattcagccacagctcgctcaccttgaagcacttcggtaaggaaggtgtacatatgcggatcaccaagcccacggctccaccacagtttcggttcatcaatggagactggaatctccacagtctgagttcccggttgtagtgatacggatctttcccatctctgtccatctgcgccgatacgaatagtcgtatctaccgcttgtgatgtctcgacttccacaacagctgttaatgaagctgaggtagcgcttacttcattttgctggatatacacatcattgattcgtacctgtgtccaaccttcaagacgtgcttcacgccagatcccactggttacaaaacgcggcccccagtcccaaccatagtgatacggggctttacgtgcaaaaatacttactctcttgttgccaagtccaccaacatcggactgatcattcgatgcaggtaatgcatatccgagcttctccagcttcggcagatcttcctgaattggtgaccgaaaacgtattcgaagaatgttgccgttccccttcaatacagactttacatctgccttccatacccggaacatattatctgctgataacacatgcacatcattcacatacacatccgcatatgtatccagaccatcaaacactagttccagatgttcttgggagaacaacccttcggcaacgtcaaattccgtctgatattcccaatctatcttatcaatccattgtacttccttctcgtttgttccataaaaaggatctggaatcttgcccagcttcagcaaatctgtatgcacacagccgggcacctgagccggcatccactcttgatcttcgcaagccttgaacgtccaattctgaaaaacatgtgattgtattgtgctcatgacagcctccattgttgttagagttggtaaacattattttgttaggttttgttattataaaaacaaataacttacaaaacaaaattaacacgatatgcttcttatagtcaatctgttttgtgatttaatttgttaaacaatctctgcataacaaaaagacatgaagctctaacctctccatgtctttcacctgatttcatttacccgtatgatcattgttaaaatgagcccgtaaattcatatcccgttacagtatactggcgttatattcatcacgaataattaattccgaatagatcagcttgcgttcataaggttcatccaggtgtttgatccgccacaatagctggtctactgctctcgttcccagattctctttgttaatatgtaccgaagcaagaatgggttcatccgtctgcgtattgtcaaatccggttacggcacaacgttcgggcacctgaatgcctcgactttggagtgcctgaatgacaatgacagctgtatggtcatttgcacacacgataacttcagggatatcctccagctccatttcagcaatggatctccggatctgatcatactctggtcccagcaagccgtcttgctgttccccctccaactgtttctcttccagcaccatacgatatccaagccagcgttctctaaaacttgctgcatcgggcagttgcccggcaaactggaaccttctataccctttaccaacgagcatgagaaccagttctttcatacatttcatattgtccgtaaaaaccgagtctgcgtatatggcagggtcttcatgatccaccatgacaagcggaatacgcagtctgtaaatctccagcaataccgatgtcgagatggtgcccacggtaatgactccgctgattgcttcgggattaaggaccgagaacatccgatctgaagagggttctgtcagcgttaaaatatccatccccttctcattcaacctctcagaaatgccatcaaacacaggcccccagtataaggaagctcgattctgagaacgaatgttggggaacaaaatcaatatggtgccttgtcgctccgcttctggcttcatctccgttgatatctgtgtctcccccggataacgcttaggctcagttctgaaatacccgagctgccccgccgttctgacaatcatctcgcgtgtatgctcactcacaccaggcttgcccgtcagcgcacgggagactgcgaatttggatacccccgcagcatccgcaatttgctgcatcgttactcttttggccatcctactcacccgtttttcctaattttccattcagtgtagcataaaaaacaaaaatcaacaaaacaaggttatgttattctgtttttgttaggtagtagtttatctgtttcacaaggtgtgcgacataaccaaaaaaggcactctccccaccttccatagaagatgacgaaaggaccctttgtccgccaattatacgcctggtgctccctgatcgccgagttccgactgtaaaaccgggcgttttctgcgccagaagataggctgtggaagtttgatctctgtgatcagaacaccaaccaacatcaaagctgctcccgcatacccttgcaacgttagcgattccccttgaaaggtaaatgcaaaggctgctgcaaacagtggttcgagtgaaaaaatcagacttgttcttgtgggagaggcatggcgctgcgcgagtgtctgcagaatataccccaagccgctacacaaaacacctaagccaagaatggctgcccaggattcagccgtatccggcatacgtggcgtttccagcataaatgtagctgcaattccccacatcgccgcaacacccaattgaactgttcccaatgttagtggatcatgcttcggtgtgaacttgccagcaatcattatatagatggcatacacaagtgctgctagtatgcagagaatatctcccgtgtgcagactaagctgatgctgaagcgtcagcaagccaagcccggtaactgcaaaaaggatactgagtgtcaatcgtttatccggcatacgacgatgttggatggtcgtcagtatcggtacaaaaataacagccaaacttatcaggaatcccgcttgggatgtcgtggttcgttgcacaccataggtgatgaatacaaatgcagcgaataaagctgtccccataatagcgcctgccacaagtattctgcgatccatgttaaacaaccgccgatgaaaaagaagccctgccgcaataaaggcaattccaaaacgaaatgcgaccagattcaattcttgcatggactccaggcccgatttcataaacagataggaagatccccatataaccgttgcgagcagcatctgtatgtccgctcttcttgttgtctgaccttgattaacctgtacaccattcatcttgcttcaaccttcattctatgtattctgagctgtgtgatcgtgcgtcaaactaactcgccttggcaagtataaacgatctctttgcattataaaaatgaatatttataatggattatatgaaataaattcatgcatcaaaaatgggaaggaacggaaccattcatgtcactgatcaaatacgaaatattaaataccgttgtggaatatggcagtctcaccaaagcggcagaagcgttgaacatcacccaatccgcagtcagccatgccatagccagtctggagacagaatgtggtttttccctgctccatcgcagccgctccggtgtgcggattaccgctgaaggggaacgcattctgggatacacacgtgagattctgcgctggacggaactcatgaaccaggaaatctccctcattcgcggcgctgagattggtacggtgcgtattggtaccttcgcaagtgtctccacacaatggttgccgggcatcctgaaacaatttcgcctgcgtcatcccggaattgagattaagctgtgggaaggcgattatgctgagattgagggctggctagctggaggtgccatcgatctcggatttctgtccctcggcgattcatcaccttttgagacgatcccattacaaaaagacaggatgatgtgcatcctgcctctggatcatcctctcgcctcagaggagtctgtttcgtttgatgttttactggaacaaccctttattctgcccaagtggggcggagataacgagattgaacgactgatccggcagcatgcggccaagctcaatgtcgtctatgaagtagccgaggatcaagccattatggcgatggtccgtaatggcctcggtatcagcctgcttccggaaatggttcttcaaaatcataccgattcactcgcgctcgtgccactctctggagatccttatcgtacaattggcatggcctgcccatctttgggcaatctatcgccagctacgcggcgtttcattgaagaggtacaacagtggctcggccaggtaatgtaaatttggagaactcactacctctatcgttaagatcgatttctcctatccgttactcacaaattggataacgccgagggtcaatatcagtacagatataatcccaatcgtgatgccaaaaccaatcaggaagcgcacgccaggtgagcgtttgttctgatggctgcctcccaggttatccaattttcgctcaatttgatccaacctttcatttacctgtttcagatcttgattggagttcattcatccatctcccttttctgtgtattcgaactattcccacacccgatcgagctgatctgcgtagtaacggatggctctgttatagtcattgattctcttgtcacttgatgtgtccgcaagttgcacgagcagtcgttgcatcgcttctgcatgttcacccagattgtagagcaccatggcatagaaaacttcaaattcccggtacgccgggaattctttcatccctttttcaaaccaaacctttgcctgctcatactgtccaagcgttcgatatgtgctgcccaacccgagtatcgcccctgctctgtcctcatcagaaagaccaagacttagtgccttctcataatgcgggacagcttcccgctccaatccaagcgaatcatgtgcccaagccagctgataccagacattcgcattctcgggttcctggactgtaatctcttgcagtagttcaatcgcttcctgcaccttgccttcttgtctccatcgcacggcctgttccaaattactcatgctgtcacttcccatcttgcattataatttccacttatatgattcaattgttttattataccaaaaaagcaccctatagaatatgttgtaacaactcaaggttgtccaaacgctattccatagtgtgctttttcattcgatgcagccagctagcttaagctgaaatctctctgaaaacgatctgttcatcacttaattaagaccataccgtattcgctaccataacaataaatacgagcatgagataattaaccgagatcagaaagtttacttttgcccacttctcatcatcctgtgtcttcagtccgctaagtgtatgcacgaaccagatcaatccaccgaccagagatacaatcagaaataccagacctacgtagtcgtaataatacaacaggaatacagcaggaagcagcagaaaaacataaggaatcatctgaaacttggtgcgtttcacccctttaaccactggcaacaacgggaagccagcagcacgatactcctctacccggcgaatacccaatgaccagaagtgtggtggttgccacaagaataatagtgcaaacagcaaccaggctccggcatcaatctcattggttacagacgtataaccaatgacaggcggcatcgctcccgcaattccacccagcgacgtgctccacgtcgaactacgtttcaaccacatcgtgtaaatcacgatgtaagcgaaccacccaagcagtgccatccaacctgataatggattcaccaggagatacagtactgctagtcccacaacaccaaggataatgccatagccaagtacaaaccctggcttcagatggttaatgtaatccatcctttttttggtgcgctccatcttttggtccaattcacgatcccaataattgttgataacacaagctgaagcaataaccaaagttgatccaatcacgaccatgagcagagataaccagttgatatcccattttgaagctacccagaatcctaccgccaccgcaaacacatttaaccttagaagtccgggcttagttaatgcaatcatgtctttaagcatgaggctcctcctgaactatgtaaaaacgccattccaataatgatacatgtacctaccattaattacaatcgctttcatgaatttgtcataaccaaaaagcatccctcaccgttccaatgaacaggaggaatgcttgatgatgaatttcatcttattttatgggatgtattgttgcacaattttagtaacttttccgtcctgcaccgtcaggtgatacgggaatacggacagatcaagaatacgggtattctcatacaacgattcgaacttggataatgtcacaggttcattccactgaatgtctgcgccctgcatcgtaccatcccgatcatacaactgcatcaatacttcagcattggcactaacctcaacctgctcctgctctttgctgtcattgacaatatagtaaccatctggagcaccgtctatacctgcttccggattgcgctgtgcaaaaatcgcatcggcttcttcaccctgataccagccaatcttgtccactgtcataaacaatttgccgtcttctatatgcataccttcaacataggctgtaaacatctcggagtttgcaacttgagcttctttcgcagaagtttgttgagcgtccgtactaccttgagcattcgcaggggtaagtaaatatgtagtcagcacaatcataccaagtaaagcaacaactgcaccgatcattcctagtttccattgttttgtcgcgttcttcataggtaacatctctccttaatatgaacgttactattccttaaccggaagtcttgcttctcaaacgctcatgtgaactatcgattccaaggttctttcttttcctatcatacttcgaacagggattataaaagtatcagccagattaaaaatagttacaatgtgcgtcatcactcctgtctgtattctccgtaaacggcaataacccctgaaggcatcgccattcagaggttatttactagggtgtgttttttaaactcaggcaagtgatacgttgaaggatgtctgtgtcccaaacatcttgaagtccaagctacctagtcctgacgaatggtccagataactaaggaatcgaggacgtcttatttggttttctggcggtccttttattttgtaaggaacatgagacacgttatttgccaaaatttcctggaaatacgctattaacggctgtttataccaatataacgtgtgtcagattccttagattgctacgggactttcaaacccctgaataagacgtcacaggttcgttagcgctccccgctctatgccctgctccagatacgttcatagttacactccggcttttggcatgtttttggcaggtttgaagaccagctcaaagtatttcttatgcttacgcatagatactaatcttaatgattgggtgtggagctttgtgccaaacgaacgagcatatgagccagcatgtgacgttcatcttctttgcccacattccacaactcctgcagcagtttttcttcacgattacgtggttcctcccgagctgccagataatccgctactttctcggcaattttggccatctgctcctcacttagtccaatcgattctcccatggcaattcgcttacccaggtattctttgaacgcatcaaagttctgtagaatctgttctctttcttccggcgcaatcttctcaattgcattgtccaccttgtcagttgaaacttggccatctttatggattacatgattttcttcattcatttgaataacctcctgcataatagttgtttattggttttaaactttaaacttgatactcattggttatctataatataaacgtattgcagaagtttaatcagtacgttcaattctgtatatatcttctatatatgagcaagtacacgtttcaaaagaactacagcggttaatcgtttacatatacgtaacggtgtttggatatgttaatgaacaccttatacaatatcgaaccaggagggatttcccatgcgtgataaaaccaaacatgagaagacaaacgatgaacttgaaccaggagtgaataccgttatccatccagacaaaaacaatcccggaccaaccgatatgatcgaaggcgtggttggtgatatcgtggacaacattcgcaaagatttctcacataactcgaagaacgagaagtcttcttccaagtcaacggattcatcggataaacaagcgtaatccttttctccctagcaaaagatagctcaaaaagtcctcctgccacatgcatggcttgggaggactttttgataatgaacaatggaataatcaacctcatgtctggaggtacaattcaacgcaaatcttctgtcatctgctgtaacgccttatgaatccagatcgcggcaatggaaccttcacccatcgcaacggttgcttgctctgcgtgcaggcccagatccccggctatccatacattattcgctgcctgcaagctgcgcggattagcttctacatgtttattatctgcgattacagctccaagctgctccgccagttcatagtgtacccggttgcctccaaatgcgataaatccacgctccgactcaaaaatctgtccatcttcggtcagaacaccggtgatatggccatcctcaatctgttgtacttcctgaacagccgcttccagataacgaactcccgcctctttcatgctccgatgcagctctgcagatatgggagcctgctcatgattgatatataacagatcattcgtacgctgaattaaaatcatcgccatattggcacctggttcgccagatcctaatagtaccgtacgttgatcctgaatctcataaccatcgcaatcagggcagacatacactgttcggcccagcgtaggagttaatcccggaatgtccggaactctatccgagagccctgttgcaagtaacacagttttgctcctatattcagatccggaagtaccgaataattgaatatgttctccctgacgttccgctttaatgatacggtctttctcaaaagatacaccggtctgctctgcctgcatcctgcctcgttctctaagctcttcaccggataccccatcggggaaaccgaggatattatgataagtccggcacaacgtcgatctgccttctcccgcgtcgattaccaacacctgatgagctgaataacgtccaagctgaatggctgcctgaagccctgcgagccctccacctacaattatgcaatcaacctctcgcatgctccttctcctcctgaactatatacattgaactaaagaatatttacactggtcactccgatgacagaacaaccttccgatcgctgttatccccagatttttttaataccttttacaaagggtaaatccggggataagcgtatgctttcgatgcagctttctttcagaaagcttttaggcgcacgcttcgcttcttcaggctctttctgtcctctccgttattgtgtaaatgtttagctcaatatatatatattttgtccttatatacattaaaccgttcagccaagcttaaacgattcctcatattgcttatcttataccaaaacaaacagacccaaacaaaccatccggcagcatcccggttcgcttgagtctatcagattcataaatatttagaagttatacgattcaaatcgcgatgcattcgagatggcgttccatacatccgctgtttcgccgcccatataccagtaagccagtccagcgatttgccgttgctcactcattaacactttggctgataacgaacgactgtcctctgcccatatatatcttggcttaccattactgttgtacccgataatatattgaaccagacttgcatcccatcgtcttacagatcccgtagcatgcgcacgcattccctggtctgccagtgtaatgtcccaagagctggttgctggattcacggaagaccagtctcgtgtatacaatggaagggccaaaattgttttggcacgtaccacctcggagagcatggtatccaaagccttttccacccatggaagagacgccactgatcctgctttcggatcactgttccagtgttcctcgtatcccattagcaccatataatctgatacagcgcccagtttggcataatcaaatgcatccgtccaatcagtacccaggtcgggcgaaacgtccacggacaccacagcaccgagtgcgtgcaacgtagccgtcaaagaggtcacaaatgccgtcagcccttcacgatccgcaggatcaacattctcaaagtccacattaatgccgtccaatttataggttttgacataagcggctacctgtgagatcactgtcgctcggttggccgaactggataacatctgatgtgtaattgccgaatcggaacgattcccaagcaatggccatagctgcctgtcggtggcggatgcccaggagatcaatgcagggtccgcgtgatctgttactttcatactgctgttcaggaaaaaccagcgcgggacaagtgtattgacctcagactgttccacttgtttcttgaattcagttgtagtggagttatattgccagcccaactgaacgccaagttcatccccacgttgtaactgctcagaccatgttttcttttgtaaaatggcatcgagcattacggctgcttcttctcgcgttacctcgtcatgtggtcggaacacgcctccgcttccccgcattaatccaagttgatataccgtctgaacataaggacgtgcccagtccgagatatccgctgcgtcaaaatacgttgaagataagagcgaggtctctacgggttgttgttttaacattcgaacaagaagggcagcggcttcttcgcgcgtaatagaagcattaggctggaacgttccctgaccctttccttccaaaataaaaagattcgtcatggcagcaacgttgccgtaataccaagcattcatgcttatatcctggtagggatttatattatttttaacgggcttcaaacctagtaatctcaccgcaaacgtcgcaaattctgcacgagtaacggctttcttcggttcaaacgtagtctctgacgtaccggcagcaatacctttggcaaccagatgtgtaatggcatccttggcgtaactggtgtgcgtatcctgaaactgttgctgcacggttgcagcctgaacggtagagctgtatccagccaccgatccaagtgttaataacccgcacaaagccattttccatatccgttggttcgttatgtcttttaatctattattcacatcaaaaagcctcgcttcattggattacgatcaactatcatcgtatcaaattgaagcgaggccgtatgtggttaaatgttgggaaatgcgaagcttacttgtgtacttttacgcgctcttcaattggttggaattctttctcacccggtgctgccgttggtttaccaaatggcatctgagcgatcaatctccagttctcaggaatgctccattcttgcttcactttctcatcaatcaacgggttgtagtgctgcaaagatgcacccagaccttcttgttccagagcagtccagattaccagttgcaacataccgttggattggttagcccagattgggaagttatctgcataagctgcaaaattttgttgaagctgtgcgatcgcattgttatcttcgaagaagagaaccgtaccatatccgctgcggaatccagtcattttctctgctgtggatttgaaggcttcttcattacctaccacttcacgcaaaatttcttctgtgtgattccacaatttatcatgttgttcaccgagcaatacaacggcacgagatgtttgtgagttaaaggaagttggtgtatatttcaccgcttcttctacgatttcctggattttagcatccgaaattgtagattccttgctgattccataataagatcttctgtttttcaacgcatcaaaaaaagttgtcattcttattcgcctcccaaattttttttcaattgccaacatagtaactataatatagtaacatacattagtcaacaaactaatttattttcactaaatatacattcactgaaaacatttcaacaagtttgcccaatacagcaattgggattatccttcgcccgtctttttgcgataatccgcccggtatttctcttccgtagacgagttactttttgtctgatctttattcttctcttcctgagcttccatattcagatcttccatcggaattggatctacagtctgttcttcttcatgtcggtcaagcagactttcgtgctctgtcttatattgttcaggattgccacgggattgttcctgttgggtatcgttgttattctgatccggtgtgcgctgtttcattcatattcgcctcctctgggttcattacctttctttacctgttctgcgtgtcctctaaacacagtcggatgcattcctcaaacgaaaatcaacaaaaaagccaaccatacaagctggtcagctcaaagacgacttctatgattggcgatgcaattgggtacggtacagatcaggcgaacatcccacactttgtttgaacatgcgactaaaatgcgaaaggcgtttgaaaccggacaatcgacttgcttctgtcacggtgatctgaggctgaaactgaaacaaaagcttcgcctgattgatacggcggtcatacaggtatttaaatatcgtcaaacctgtcatttccttaaacatgcctgccagatatggcttggacagatgtaattccagtgccagatcatccagaccaatgtccttcatataatgggtatccacataacgaataatgtgttggacatgccgctccctctccgatgagggaagttgttcatggacatcaccctggcagatctctgctacaaaatacaacagatcacacagtctgacattcattcgctcttgcctgaaattgctctgactttgagacagacgatgaagatcatgcaatagagcttcgaattcagagcggttatcccccttcagattgacccggcaatttctgagttcttcaaatggtctcaggacctcagccatacggtccggatgcaggctgctgcggattgcagacggatcaaaatgcagtgtgcttcgctcataagcactgcctggcttcggatgtggtcgatgaagagtcaggccatgcattaacaccagatcacccggctccaggttatatacccggtctcctatgatataggtacattctccatcatgaaaataataaatctcataatgtggatgtgaatggaatccatctgacttgcctgggttaaatatgctggtggatcggtaactatactccagtgaagcgctaaattgcatcatgctcggcacattcatgcacctcctgttcggaagagggaaacgatttgtatcatgcccctgtaggatatatgaaagtgaaattatagaagctgtttaatactctcttgaatctcgtcgatggagtcgacaggttcgaagcgtctgaccacacgaccctctgcatcaatcaggaattttgtgaaattccatttgattgcatcgccgtgtaaccattctggtgccttctcagccaccattaatttcaataatttggcctgtatatctgtttcatcaaagcctgcaaaaggccctgatcttttcaaaaagtcgtagagcgggtgcgccgcttctccattcacatccagtttggagaacatcggaaatttcacaccatagttaatctggcaaaacgattccgcttccgaactgcttccaggctcttgctctgcaaactggttacacgggaaaccaataatctgaagtccttgatccttgtactggtcatacagcttctgcatgtcatcaaactggtgcgtatatttacatttacttgccgtgtttacgatgagcacaggttttccttcatattgatagagtgggaaacgctctccactggttctggttacggtaaagtcgtagatggttggcataagtctagtgcacctcgcgatagttatgtagtcatacagcatcatatgtcattgttaattatatacgaagtttgaactattgtatcggagaagataagttactctccctttcaacagaaaacccttctgccgcgaaaatctcttcgttcagcaaaagggttattatatgggatcacagtgacagcagcttcagcccttcacggcacttccggccacgccctgaatgatataatgctgacccacgaggaaaacgatgatcatcggaataatgcctgccgtggcagcggccatcatgccgttgtaatctacattgttctccagaataaagttctgcagtccgagcggaacggtgtacaagtctttgtcgatcaggaacacaagcgcattctcatagtcattccagtgccaggagaaatcaataatggccagggtagccagtgcaggctttgccaagggcagaatcagcctgaagaatatgcgcaggtgaccggcaccatcgatgaacgccgcttccgagatctctgaaggcacggacaggaagaattgccgcagcataaacaccccaaagatcgtgaacattccgggcaggatcaatgcccaatgcgtattatatatgccgacccattcaaacatcaggaacttgggcacaaatagtacctgcggtggcaccatcatcatcgagagatagatcagaaacaatgtctcccgacctttgaattgaatacgtgcgaagccataggctgcaaaagccgagagaaatacagctccgatcgtgctaattagcgatattttcaacgagttcagataatacgtcgcaaaggtgtccgctccactccaaaccttaatatgatgctcccagttcaggctggagggtatccactggatgggataggtgaatacgtccgccggagatttgaacgacgtgctgatcatccagatgaacggcataatcatcagcagggcaaacccggacatcagaattgtcagtatgatttttcgaatctgcgtcaaggactccatgcggactttaactttaggtgaatgtggagctgtgggcttcgcattcgcggcaatttgtttctccataacgatccctcccctccttaatagtgaacccaacgtttctgaccgagccactgcaaaacagtgaatatcatgatgatggcaaagagtgcccagcttatggcggcagcgtatcccatctcgtaatatcggaaggcattctggtagataaaaagtgacaggacggttgtgctgttccccggcccaccctgggtaatcgcttgaatgataccaaagtttttgatcgtcataatcagccccgtaatcagtagcaaaaaggtcgttggactcacaagcggccagatcacttggcgtatcgtctgccaaggacgggctccatctatccgtgcagcctcaaccagttcctccggaatttcctgcaaagcggccagataaataatcatgttgtaacccagcatgaaccagatccagatgatatcaatcgcatacatggaccactcggttgttgataaccagccgggagggttcgtaataccgattccgcgcaagaaaccattaatgggccccgatgttggctggaacagcagcatccagacaaaagcgatggcaacaccgctggtgatatagggcatgaaatagagagcacgcagcgttttttgccagtacacggacttgttcagcgccaccgccacgataaatgccaaccccatcgataccggaaccgctaacagaaatacaaatgtatttcgcagcgccacgccaaacagatcatcattcaacatccggcggatattgtccagcccgacgaaattcgtctccgggctcatgaatttgtaatcagtgaacatgagatagaacgaatagacagccggtataataaaaaacaacagcacgccaatcatattgggcccaataaacagatacccgagtctgctctgccgtttcatccaggatttatgcatatgctcccccactccttaacatctgttctggaattaagcataacaagatgtcctctaacatttaaggaacataaccctgtacctgatatcacagatatatgtatttcggcagtgcctttcgggaggaaaacaacatggaattgttctattgcttatatagaaaaaaccgccccattgggacggcctttggactcattgcttttgcaacctattgattttgcttcagccagtcattatggcgtttgaccatgttctgtaccgttacttcggcagtctggttaccgaggaagaacttttcatactcctgtgcacgcagatcgaccacttcctgcgcaatgctgcggacaaacgtaggtgtctcgtcaccgtacaacacaaattccagagactctttatcataagaatcggcataatcgcccagcagatgatcgatcgcagtctgttgatcaaccgcattggaggaaggcaaacgtccacccgcagccatcggcatcattcccccatcggcgtaccatttcaggaactcccatgcggcttctttatttttcgacttggaattaatcgcaataaagtcaccaagtcctccactcttcaccatatctgcttcttgtgcagccagtctcggtacaggggcaaaggcaattttccaatcccgcgggaattcggtcatgttgtttgatgtgcggatcagccattcgccgatgttaatcatggcagactcaccgccaaggaacatgttctccaccggcattttggaagtcagctgctctccgagcggaggggtggttgcatcctccttcatcattccgttcaaagtttccagccatttagtgacgagcggatcatctaggttggaagtgccgtctgccttaacataaccgttcttcaccagaacggaatcgagcgggtctacataggaagcggtatgctgcaccaatccgtacttgaagccagctgtcttcagtttgagtgcatattcacgggcttcatcccaagtccaggctgttggtacgctcagtcccgcttgatcaagcgctttcatatttaaagcgaagaaggcagcgtttttcttggttggcatcccgtaatatttgccgtccactttccaggaagccgcatcttcacccattttctcatcaatgttataatcggtgaactcgcccagatccagtgctgtcccacccttgatgcgtttatccagatttgtgagggtatagttgacatacagatcaacgttctgcccggtggacagcgctgtatccagcttcagattgccatcatcatcattcacaaaccgaacatattccacctgaatatcaggatgctccgcattccaggtatccaccacttcctgtggaccattctcgggcggcaccgcgccccacatggtgagcttcacttttccccctgccgctccacctccgttatctccaccgttcgtctcatttttacctacacagccggcaagcaagcccagcatcagcgcacctacgattaatcccgttaatccttttttgattctcatctggtcacatgacctccctgaattgaagtgtaccttccgttacatcgtagcagggaccttgctgggttcataagatacatatccatgattcggattgaacaaaaatacggatttacttgtgcttgcctgagcactcggtacacatattccttctactcatcctgtgagtcacgaacgatggcgatactggctgggcgtgcaaccggtccaacgcttgaatattttaatgaaataattatcacttccgaaccctacccggtaaccaatctcctgtacaggaaggtccgtctcgcgcaagtattcagccgctttctccatccgtaccccatgcaagtaatgaatcagggtatggccggttttctttttaaacagagcactcacataattctcgcccatcatcacatatcgtgacatggatttgacggtaatgtcctggtcgtaatgctgcccgatatactgaattattttgctaatctccggatgtttcacaatcggctcacgaacaggtgtaaatggaagatccgtatcagactggggcgcagaagagaccgtaagagaatcaggcgaaacaggcgttgatgtgagaaccggtgtggaaggtggcacttgatgatgatctgtctctgtccgggcttcagtcgaagctcccagttctgcacttactttacggagtgtatcacgcagtgaattcacactcatggacagtttcaagatataattggaagccccgtattccattgcacggcgtacatattcgaactcccccatacaggtgagcatgacaaatttggtttttaacccggcctgacgggtctgtttgagtaattccagaccatccatacctggcatgacaatatcggtcagtaccagatccggtgtatcctgtataatcatcgccagcgcttcggtcccattaccggattccccgatgaccgtgaagcccagctcttcccaggaaataatctctctcaccgactcacgtacaaatacttcatcttccacaagtaataccttccacatgccagattcccctctccagtcgtagggcgtttctcaaaactcgcgaagtgcatcttttaccgccttttcgccccatgcttcgtcactttcccttgacgtgcctcggcacgcctgcggaaaacttccttgctcggaacgaaaattcagcaaaatctgcttccttcggagttttcagacacgccctagtctgatcgcttctgtaagtaaggcgtcgacaataaaaaaggaatgctgaacctcactaatgtccccggtttggtatcaatcacttcaagttcactttggcctttgaacaataatcgcaatcgttccttaaggttagacaggccgatccccggacgtgtgcgggtcatctgctgacgccgggattcctccattccaattccgttgtctgccacctccagcatcagctttcctgtgtctttcctgtaaattccgatgcggatctgaccaagctgctccagtggcccgacaccgtggtgaatggcattctccaccagtggctgcaagctcagcttgggcacgagcgcatactccagtttttcgtcaaattcacaagtcacctcaaagctatcgcggtaacgaatccgctgaatatgaaggtaggcttgaaccaactcgatctcatccttcaggtataccaattcaacctgtgaattcaggctgacctccaataatttgcccaaggaaacacacatctcggagatctcttcattcccgctgcggatcgcactccatttcattgtattcaatgtattcaggagaaagtgcggattcatctgggcgaggagcatatgaaaatgtaccgcttccttctggcgttcctccgccttgagtctgttgatcatctgattcgcatcatccagcatggtattgaacgtacgggtcagttccagcacttctccacggctgcggccttcagggatacggaccttgaggtttttgcgtacaacctccttcatctggttctgcagatgtgataaaggccgagtgaacgtcgccgagatcataaaggccatgagcacaaatgctgctgtgaagccaaaaaacgttaaaaaatagcgctgcttaagccccgatatctccgtaaacaacacagctagtggaatacgatttaccatgtaccagtccagtgactcgatgtatacgtagttaatcagcgtatctgaatcattatccgtcagataggcctctgccggatgaagtgcaatttcccgggtcacgtctggggaaagtaccgctttttcggacgagcgggcaatcgtttccccattgccagtaatcaggaaatactcctgattgctctgcgaatccttcagcatagactgaaaccagtacgaataatcgatgctgatccgtgccattccgtaccttttgccgccactatccttcatatacgcatagagggacaacagatacgggctggaggatagctcccgcaggacatggttggtatcccgggcatcccagcggtagagcaactcttctgatggaaacgagtttgaatcagtgttgcccttgatgaaggtcatttctccaagatgcttgcgaaattgttcccgataagggccataggccagagcttttttgggcaaatacgaagtgtaaacgttatcatgaaaatctaacagtgtgaagtacacggaaggattatatagaaaaaagctgttgttgatcatcttgaacttctcttccaccaacgacttattctcaagcggagaacgattgtctggagaagtcaggacgtttcttacggctgaatcctgttccagaaaaatcagggttttgaatgcaatactcatctggtcctccagagaaccatacatctgcaccagttgctcgtggctctgttcgctgattttttgctcaaccagagattcgatctgtccatagttgtagacattaagtacgctgaatggcaacagaatcaacaccacaaacgcaccaaacagccgatacctgagcttatgcggcaaaaaggtcttccagtcgggctttatcatcccctcagcgctccccctgcaattattgagatcattataccatcagttcccccgcttcggcggggccgggctcattcgcatggatatgtgataccagttgccagggacgggatagggatacacagatttgttctattacattaaaaaaaccggagatctgggatctccggctaggctggatataacgacttagcaaattaggatataggctccactccccagacaagctcgccgttccggtaaagatttaccttggtccaatcggcaaaagaggtctgcagcgggttaaaggaataatcatccccttcgctgtaattggaccagtctgctttgtgcaaccgggtatgtatctccccagaggttcctccgatcgggatcaggcctgctccggtaccgaacttcagttccagataatggtccgctccaggaacaggtgcaggcagtttcacaatgctgccgctgatctgactgcctccaagctgtgcataatcacagaaaaaggattgtggtttctccccgtccactgtataccagtaacgaattgtcagttcattcaggctaactgcggaggtaccgttgttgtgaatgacaaactgcggtttcatttggttatcgagcagatttgtatcccctgcacgataggctagagtcagattgccagcaggctctggtggccctccaccctggacctttgcggaagcttgaacggagttcacactcttcccaacgctgttaacagcattcaccacatagtagtaggtggttccagcagataccgccatatctttatagcttgttcccgatacagcagccacagatgtatacggtccggctgctgtcagcgacctgtttaccgtataggaggtcgcacttgcagatgcactccagcttagattgatgctgttgtcgctaaccgcagtggcggtcagattctgcggagcggctggtactgcctcgacctggaccgtctctaatacggaccaataggctggcttggactggagtcgctcgtcgaaaagcagcggccagttgttgcgggcgaccgggaaggttcgtagccaggtattggcatcatccttgccccacagggtaacatttttgactgtgtccgtatgcctcaggaagatctggaacagggacttgtacagcgccgcctgctgtgtcttcagttcttccgggaagatatcataagattgcgaatcattggaatacacacttacatcaagctcagtaatatgtgtttcgaggcccagcgccttaaatttgacaatggaactctcaatttccgaaagggttggataaaagaggctgatgtgtgtttgatggccgactccgtcaataggcacacccttggcttgaaggcgagtgatcagattgtagagggcctggcttttggccggctcatgggtattgtagtcattaataaacaacttggcatccgggtcggctgcatgggcgaattcaaatgctttctcaatatattcttccccggcaatctggtaccacagactgcgccgcaggccatccggctcggaggtatcaatgacttcattcacaacgtcccaagcgtagatctggccttgataacgctccattaccgtctcaatatgctgctgcatccgttcatacaacaccgttttgctcaccagattgccgttggcatcgtggaatacccaatccggagtttgtgtatgccaaacgagggtatgcccgcgtatctcttgtccgttcgctgccgcaaatgcgactgcggcatccgacccgctgaaattatacataccctcttgcggctcggtactgtcccatttcagaacattgcctggtgtcagactatcaaaatgcttcgtaagcagctgcttgtccggttcggtcagcagttcattgttcgtgaaggccgtcccaattcgaaacttgcccgcaaaagcatcctttagggaaggaatgtcttcttcgatcacaatgggtccgagatccggcaacttctccaatcggaaatcatccacataaaaagaagctgtggcacggtctggcacttcaaaataaaccgataactgattcgctggttccagcattttaaactgtgcagtaagcttggtccatccgcctgcggatgcggtaccgaatgttaaattttcataatttgttgtatctggcagggtacgttgtaaagacatattgaggtttgtgctggacgctcccgccggaagcttcacccagccagtgaacatatacgtctgtcccacctccaaaagttctgtcacatccagcgctggcccatgccatgtcatagcacgcccactcacttccagtccataatctccggtacgagctgcaacggcgcttgcatgaagcgtttctacttcaccgcgtccgctccagctctggaccgtgccatcttcaaaatcatgactcagaatcaaggtattctccccttctgccgcatggacagatggagccgcccaatacaaaggaactaacaaagttatcatcaaaacaaatttaagcgctttcaaaaatatcatttttctcatcgcttccattctcctttatcgaatattaggatgaattccttattccaaaggctaaggccatatccacctccttggttttagttataaaatcagagtcctcattcaaacggatacgggggggcatacgttcggataaggactctacatggtaaattatagtataaattgtccatgatctacaactgaaatgtacttcccctctaatttcggttaaaaatgcagtatccgttgcttctgcactcattcacaccagctcctccataatctggacaacccgtaacgaaggtgtatacctggtgctccgctggcttcaaaaattgtctttaaggtagtcttcaaagctttctgctcacttctttcagcttacaccctgtgtctcctgcgatactcagatggacttatgcccaacgttttggagaacactctactcagataaaaaccgttctcatatccgcatcgctcggcaatttggttaagggtcaggctgctgtcagccaagaggttctgcgcttttttcagacggacccgtttgagatagcctgatggcgtctcctgaaaagcttcccggaaacgccttgtcaactgcaccggactcaaggccagtcgctgtgccaattcctgaagactgatctcctcttccgcccgctcctccagcagcgctgccgcttcagccattcgtgcgtcttcggtaaatctccgctcttgtaagcgattctgtctgcgttccacctgatacaactgccacaaatccatcataaaatgtgccttccaacgggcaacttcccccttattctcctcactgtcctggcgtaaataagcgtacgtcgaggctaaccgcttcgtgtcattaatcagcgattttccggctggtggcagaagctcctcctcctccaggctactgctaaactgtaaatagtgaaatgtcagcggagtaatgactgtccgccgaaaaggaaccgccggggggcacagcaccagatcgccaaaactcgcttctccgatctgacccccaatctcataatggaatattccctcttcgacggcaaaagccacccaagtcgtatagatatcttccgtaagagcaaattcccctttttgcttccagtagatgtggttaagcagctccatgacttgaccaccctttctgtgaaataaagtatatgtttgatgatagtatagtgcatttaaaaagtgaatatataaatctaagatgaaattatagatatgtagttgcagtcaaggtggatctaacttcagttaaggaggtcacagatatgaaacaagagcatgtacaatacgacatcaccgtcatcggcggaggacttgctggtgtatgcgccgcgatagccgctgcccgcatggggcagcaggtggcgctggtgcagaaccgccccgtgcttggcggcaattccagcagcgaggttcgggtctgggtgtgtggtgccaccgcccacgggattaaccgttatgcccgcgagacgggcatcatgggagaactatttgtagagaatcagtatcgtaatccagagggcaatccttatctctgggacttgatcattctggaagccgttcgagctgaaccccacatcagcctgtacctgaacacggatgtacatgaagtcgaggccactggcgatggtgatgaacgcatgatcacctctgttaccgggtggatgatgggctccgagcgtagaattcattttgagagcaacttctacctggactgtacgggtgatggattggttggctttctggctggagccaagtttgcactcggccgggaagcccgcagcgaatatggtgaagaatgggcacctgaggtggctgatcagatcacgctgggcagtacactcctcttttataccaaggatgctggtgcgcctgtccgttatatcccgccttcttttgccaaggatattacacagaccagcattccgattcgtcgggtcattcgcagcggggattccggttgtcattattggtggattgaatggggcggtgaacatgacaccgttcatgacaatgagctgatccgtgatgaactgtggtccgtgatctacgggatctgggactatatcaagaattccggcaagtttgatgccgacaatatgacgctggagtggattggttctctgcctggcaaaagggagtaccgccgcttcacgggtgactatgtgctcacccagaacgatattatcagccagcgggagttcccggatgccgttgcctttggcggctggtccattgacctgcatcccccgcagggcatgtacgccgaagcgagtggctcgaagcatatgcatgccgatggcgtatatcacgtgccgttccgctcgctgtattccgcaaatgtgcggaatatgctcatggccgggcgcgacatcagtgcatcacatgtcgccttcggcacaacgcgcgtcatggcaacatgcgcggtcatcggcgaagccgcgggtacgggcgcggcgctctgcacgtccatgggggtgtcgccgcgcgagctgcacgcgaggcatctagcggtcctgcagcagacgttgctgcggcaggacgcttccatcatcggggtgcgcagccacgatgagctggatctggcccggcgtgcccaggttacagcctccagcacgctgacgggcatcgcccttgagcagcctggcgagacgtacccgctgggtacagatgtcgccctgttgctgcctgtgcatccagtgctcagcggcctggagctactgctggatgcatccagcgataccgcactgacggtagagctgtgggatacggggcgtaaggagaactacgtcccgcattcgttacaagttacggcgaccgttaacgtgacggcgggaaccgcgcagtgggtgaagcttccgctcgaatggcgaccggaagaaccgcagaatgcttttataatcatccgctccaataaagccgtctcactctaccattcgacagaagcacacagcggggtgctaatcttcttcaaaacagaagaaaaccacgtgtccaaaaatctggaggatcatgcaacggatcagcctgtcgtattatggtccatgcaggggttggcgcgtcagccattctgctgtcgtaccctctctgagacttcggcctattcatcggacaacacgatcaacggttatcatcgcccttacggtgggccgcaacagtggatgtcgcagccgatgcagtctggcaatcctgaatgggtgcaactgacatgggaagagccacaaaccttggctgagttgcacttgacgtttaatgatgatgtgaacgaggatctggttaatttacatcaccatcacacaacattccgtgtgatgcctgagctggtgcgtgattatcacgtggaggtactgactcctgcttgcgaatggacacaagtcgcaagtgttcaagaaaatcacaaaagaaaagttattcattccctggatgtccctgtgtcagctcaggctctgagaatcataattgatgccacaaatggcagcagatatgccgaattaatcgagattcgagcttactaaaacaaaaaggaggatacaggaaactgtatcccctatcctccgtacaagtccgcctgattctattcggcggttggagcccgcaagccctcaatcaggataaacaacgtaagtgcttgtccatatcccatcggactgatcgctatatctttataaaactgagcatcctgccccacaggtgtaccataggacacctgctgtacaactccgttatcatcaatttgtttcaacaccgcttcaagcgcactcaagccattctggcgataggattcatccaggtatccataccggattcccttaagaatgccgtatccaatcgctgccgttgccgaggtttctttgtaagaggttggatcatccagcacagtgtgccacatgccatcctcaccttgaagcttgctcagtgctctgacttgagcggttgctgtatccaacagatatgcctttagcccgtcttcgatcggaatgatattcaggaaatccataactcccgccgtataccatgcattgcctcttccccaatgaacagcaccataattatgattttcgttgaaatcccagccatgatagaataatccggttttcttgttatatagatatttgatatgcacaaggaactgtcgtttggcttcttcaaccatgtcgggtttcttgaagtatacccctgccttggccaaaaatagcaccgtcataaacagggtatcaatcagaatttgaccatcattggcatctcccgtgatcatatgttgaaacgcaccatctccggttcgcagcagtccatccatgatccaactgctccactcctcacagacctgttcgtactccttgtttccggtcagctcgcataatgagatcaaagtaaggagcggagcgcaggtgttcacatttttttccggtaacccttccatcagccttgcattataccatgattccagaaattctagcactttgggatctttcgttgcctcatggagctggagcaagccatacagaccgacaccttgcggccattcccatagatgtatgtcgattagtccgatgggaaactgttcattgatgcttgtgtttttcatagactccatcgcttgggataccttgcttattctctcctgtagtaccatttgattcagcatgttggttatcactcccttggtttcttacacacgattcagcgctccatgtccagcaacttcagttgtcccttcactccataaccttcgtgtataatttcctcttctttaatcagaaaaggcttgttcattccccattgaattggaccatataccgggtctgttagagtgagagttaaagcttgattatcgaattgcgggcttgcagaacaaacttggttgataaaagcgtcaaatgacccgaattgctgttcgcttcctgctcttataatccaggcgttacgcaagccaggtgaaataagctcacgttctcttgtcaccccgctgctctccatactcgtcccgttggccgcatatatagctgcataacccttatccaaacgggcaaagtgccagttctcatgccttacccattccgtgaaggagtgagtaggaaaataagcatgtgtccagtcagagttgtgatccgcaggaatatcaaacatcatcaaagcgatcccctcatgctgaacaacatcgggcaatatcccattcccagcccagaagcaaggtcgaccatccccatgcttgtatatttctgccggatgattcacccagatcagcgcctcaggtgacagagataaatgctggacatgctcctgataacctggcttgcctggacgaaagcgaatgattgaggataaggagtattccttggtccgacagtgatagagcttggcgtaacctcccttgccctgctgattggcgaacaccaactgctgattctctccaagcaacagatgctcctgatatgctgctggaggactgtaatccgataaactcaaggcaacattgcttattgaataattgtttacattgccaacgccataagcgatccagcacattgaagtggttcccgctgcataaccacccagcagttccttctcatagctgcgcccaaacgttgtggacaagactccttgatgcatctgaacggtaatataatagaataacaagtccattgcctttttggcttgctgtctgagctgttcattatgggcaaattcatagatatgcaatagcccaaccgcatcaatcggaatgtatgcacttgaattccattctgccaatccttcatccaaaaagcgctcaaaccataatgcaagcctctgctctgctttttgacggtgtacttcaccggattcaccactgttgctgaacgtctcatccccaaacagctgtccggctaacagttcattggtatggaacaacaaggcatggttctcactgaagaaccacatcacatcatcgccaggttcatctatccaataccgatagcccagaatgcttgcttttacccgatcccagaacgattcactgaacagaccgctatttcgctcatctctccatagacggaacagtcccaccagatagaagtcactgcaatccttccgttgctcaatcccttccacaccctcaagcaaaatgttctccgcttcttgcagattgcctcctgttttgagcatggcgatggccttatgaatattgggactgcccttctcggcaatgcatcgcagagccaaggatttgcgggcttcaatatccgcagcttgctgagcagcctcatcatagctggtatcataggattggcagccaaacttcttggttagtacaacatttgaaactgaaatggtcagcgtgaaatatacgtaatgatgaccgagttgattcgtatgtgccaggaccaggtccgtttccttttcggcgatgtgtatcgtcttattttcggtgccatcaaaaaaattaccatactgaatatcaatctctctaacgatgtccggcaagggaagcggcagcttgagcttaatctgctcacctttgaagatatccgaaggaaaataagcctgttcgagggcttgctctgcggattttacagactccgccaaatgagaagcaataggcagggaaatcaccaattcctcgtctcccaaatattccaccgcaaaagcatacatggtatcccgctcagccagatcctcccagcaggcatagatctcattgattccagctacaagttcagctttaataacgatttcctgctccttgttacgcatgagtggcgcaaaatccgttaccatttccccattcacccacaacgtcagactgccataggtcttaatccgcaaagaggcggtatgagcagtcggagaaatgagtcttgtcgccgcgtaactgcgcagatgtgtcggtacaaaccaaaatcctgattgctccacacgtggattattccaaggagaatacagtgcccaaggcattccgttctcttctccaacgaagtcgtctcccgggctaggaaactcgctccattgatcaaaaaatcggttcagaggctgccttctcctatgttctacaaattcctttctgcatggattctcatgaatggcaaaaccatcgataagccaatcattaatatctccctccatcgttgttggaacaaaggcaacaggctttgtatatatgccgctgatcatccaatgattaatgacctgattgtgacctaatttcataggtttataattcaaggtatccatcccactccgggtggtatctgacattcaactcatcctttcattcctgaagtaatcataccgctgacaaaataccgctggaaaaccataaaaacaatgagtaccggaagcatcgtgatgacggacatcgcaagcaaacttccccaatccacgttgtattcaccaataaaattagagagtgcaagctgaatcgtatatttcgatggatcactaatcgcaattaacggccatacaaaatcatcccatctccacatgaaggagaagattgcgagcaccgcaagaatcggcttcgctatcggaagaataatactccagtaaattttccattcgcccgctccatccatccgggcagcttccaacagctcgtccggtacggacaacaaatactgccgcataaggaacacacctgttggggttgctgctggcgggataataatcgcgagtaggctattatacagccccagtgcgctcagcaccttgaatatggggatcataattacctcaatcggaatcatgagtgttgagacaaaagcaattaatatgatcgcgcttccgcggaagcgatatttcgccaatgcaaaacctgccatggagttaatcaataacagtagcagcgttgagcttacagttacgatcgtactattcataaaatacaagccaaaatcgcctttactaaatgcctccttgaaatgctcaaaggtgacgggctgcggccacaacttgggagggaagctgtacagatcgctattcgttttcagagaagaaatcacgacccacaggacaggcaggagccacaccactgcggcaacacttaacagactgtagatgaagattttgaccataggcttcattaccattacgtagcccctcctttcgatagacggaattgcagagccgagaatccaccaataaggataaacagtatcaccgacatggcactggccagaccgagctcctgtctgttaaagccaatctcataaatatattgaacaatataggtagtatctttgcccggaccaccacctgtaagcgcaaacataagtgggaatgctttgaacgcgtcaatcagagtcagcataacaacaagcaagcttgtcggcttcaaaagcgggagcgtgatatagcggaacacctttattcccgttgccccgtccaagcgggcagcctcataataatccgtaggtatagcctgcaaacccgcgataaaaatgaccatgaaaaagcctgcacgtgaccacactgtcgcgatgattacagccgtatttgcccaaaaggaagaggttaaaaaaccaacaggttccacaccaaccacggttaacagatgattcaaaatgccaaatgaatctccgaaaatccacttccaggtcaatcctacgataatgtaggaaatcatggtcggccagtaaaatacggccctgaagaacccgcgcattctaatctcgcgtgcaagcagcaaagcaatgcctaacgctgctgcatatattagcgggacaacaatcgctgcataaatccccgttcgtccgatggtcgaccaaaattcccgatcccctataattttgatataattatccagcccgttgaacttcattgggttcaatccatcatagacatggaaggaataatagatgcccaataaagaaggaaatacgataaaagttccaaagatcaggaggttgggtagtataaacagataaggagcaataacgagcttcctgttctgttttgccagcgtatttttgtttaatcgttgtccttcactcatctgcttgccccttccttatgcgttattcgaaagggaggcttcacaggaatcggtaagcccccgtatacgaattaaccaaagcgctttacgtttattgactgccaatagcctcgttaatcagcttggctgttcgatccaatgcctcctgcggagttgccttatcggataaaacctcaacaatattattttttaggtccgttgaaattttggatataatggtctgtctggaccagtcattagctgcaagaggcgaactgttcttcagttcatccgcgaaaatttcaaacatctccttgccgaattcataattcaatacagagctgtccttccgcggactcataaacaatgattcttggttatattttgaattcacttctttggacgttaagtattcaataaattctgccgcctcttgctcatatccgctgcctttgaaagccatcagaaacttcccgcctggcactgaagaacgttgtgttccttttggcatataggtgactccccattcaaaatcggttatatccttgtaattgctgatcatccagttgccagcccagtgggtagccaccgtcccggaacggaacaggttgttcggattttcccctccgagccatacggattccggcatgatcccttcttgatgaagctgcttgaactgctccatgctacggattccggcttcactgttaatcgctgctgcagtgccatcctctgttaagatgcttccgccattctgatacaaaagagtggaccatctatgcggtgtgacatcccataccatgccataacgtgctccgcctttgtccataacctcttttaacgcagctgtgtattcatcccacgtccatacctggtcaggagaggtcggtactttgacgcccgctttatcaaataaggttttgttataaataagcccattcgctgtaacatccataggcgccgctaccagcttgtcattaataacataataaggtttaagtgagtcaataaattgatcctcgaattggtccgcattgtccacgtaaggtgtcagatcaaccgcctgattagcaaatgatccggtatccgtgacccggctcagggcaggtggctttccaccggataacattgtttttaatttggtttggatatccttgaagccaacttcaatcaggttgattttaaccttggtattggtctgctcatactctttaatgatttccttgatgacttctccttcttttccgtcagagaaccacaggaaatccagggttgtttgttttggattagcattggtacctgaatttccgcaagcagtcaatacgatgagtaacatgaccaataccatgctagtgatgagcttaaacgttgttcttcttgtcatatcaacatctccttggaaggttctaatgaattttggcttcgttgagcaattcacttttacggaataactgtggtgatacacccacatattgtttaaaggccctgctaaaatatacaggtgtgttaaaacctagcgtctcagatatggacaaaatcggtgcatccgtagacagcaacaattttttggcctctgcaactcttttccgtataacatagttgcttatggtatatcccgtcgtctctttgaaagaatgacaaatgtagtatttattcaaatggagtgttttggacagttcatccaatgaaacattctccgtgtagttctggtttaaataatgaagaacccggcttacgcttgtttgcttctgggaagaacataagataggattggcggattgctcactggttgttttccggtaaatccgcagtagcaattgggtaagacttaatttgaccattgttttgtaccctgtatttcctgcccccatctcctccttgattcccttaaatatagctgtgatatactcacgctcctccggaggccaatgcaccaataacccattgggatgacggaatatggacatcagattctccaactgactgacagcaagcatgtccaaaagcaataattccgtgaaattgacaaaacttcgcttgtacaccatttctcttgaaggattgattcggtggggcacaccgcctctgaatataaacatatctccaggcagcggcttatatattcggtcaccgattaaaaaggttgcatctccttgaataaaataatgtatctcatacccattatgcgtatgaacaggccattcatcctgaaaattatctgcttctgatcgcacataaacttcattttcctgcaaagcaatattcgtcggggtgtgtatggttagcatcagtaagatctcccttcccagaatataaaaagcaatatagtttaataatttacaatgatagcgctttacaatgaattgtatcacagttatttcgatctaatctgaactatattgctgtattgttgatcacaattgttgaaaatgattagaaaggaatttatagggatttgaaagatgaaaacaaataaaaccgctgtccagcccgtaggctatcacgcggtccattagcattacctttcaaacccattcatcccaatggttttcaagaaaaatgacttctttctcatagtgggccagatgcccctcttcgaccatcttcataaaagcgacatctccatcagccgcacgatcagtcagtgttttacacatgaaacggatacgtgatatgacccaatccttcaaatctgctggaacactcagcccgtacgtagccatgaataaggcaatccgttcttttcgaacagttccgtgtgcctggctgacgtatggcattacaccctttccgtccatctctggtgagaaatttgcgagtggaacggatgtatacaagacataggcgatatcccacattcgcggacccggacccgccatatcaaaatcaataatgccttgaggacggccatccttgtacaccacattatacggcgcaaaatcgttatgacatacaacttcatcttctgttatgcctggatatctgttcgttgaaactgatgttgttgtaaatccaacggtcgcatcatggtaacttctcaacagttttgcgacttcaatcaaagattcgtctgaccacatatactcttctagatcagggtagtcattgcctggaacgatgccttcgaggtaagagagcgtttctctcccctgttcatctattcccagaaatagaggggcatgatcataaccaactttttcgagatgtaaaagcagttcaaccacatatggatttggtttcacatgccggcgaaccgtctcacctattctgacgacctgattcacattacctcccgataacacttcctcctgttgggccactttcatccctcctcaagctaaacttccttgttatacccatgattacgatttttcttataactcccggggaatcccgccaccaatagtatgaatccaacaaaaaacatgaagtatacgagtaaacctgttggatgctcgttcatctgagcaaactggggtacgttcgtccctcctgacgcatatcctgcttctactatagcgacagagactcggattgaaattctctccatcgttgaaataaacacactgccaagcatgaggactacacccaaaatcttgttaatattattcatttcatgcctccttgattaaccgtccactttttatgaggttatctacttaatgtctttcgattctctagtccatattcctgcatgttatattaacggtccgttcctatatcatcatatcaaatagcggcgtcatcactgacgccgctgttgacgctctctgaataagttacgtagctaccacttggtgcagatccatactattttcgaaaaaggctgaccgttcaacataatacagatcatacatctgttcattcaaattaatccgttgatatacatctggatacaaatcattggctaacttcacataaggcagtttttgtactgcttttctggatcttatattctgcttgcgaatcttcataaataccgtttcaatcccatgttccagaaacaattcaacaaaaaaggctgatttggctctttggctatacccatttccaaaaaacggtgaaccaatccatgtggctaaaaaaccggtttgatgctcaatatgatatagatcaatggttccaataggctgccctgtttcattcaaaatcgttcgggaaatcactgtcttttgctcttcttcgaccatcaattgtttggtcaggaatagatattcttcatacgattggcattgataacgaacgtagggaaaaactgcggggtccatcattaagctgtacagtgaatggcattcctgcaaatcacgtttttttaacattctgtctaccacctagtccttttagttcgccatatcaagcaaattaagtatataaaagctattgtgggatttaatgaattctgtatgtggcttatgtaaaatgcattggtaaatgttgttcatcttcatctccggtagcacaaaaaaacggcatgtcccttttacaggaacacgccgtttacatggatacagccagacagtaatttattgcataccttgcatgatggcattaatgatattttgctgcgtcacggttttgtttgaacggttaaacaaggcgaatccatgttgaccgttatgcccgttatcccaataaacagggaccattttgtattttttagcttttgcggtaactgcttttgcgtatgcagcacgatatacattgttgctggaatcgtaggacgttttatcaatagaaccgaactcaccaatcactacaggatagccctgagtcacaaatttgtcgtacatggacttgaactgcgattcaagataatcctcttgtccccaagtagacttcttggcaggattcgtagaagttgcaccccactgtgtgatattaccgttttcctcacctgcaaaatcccaaggagagtaatagtgtgccgagatcatgattctcttctgcgaactaggaatagccgaggatctgtaattatctgtcggaagaacaaagccataattaccaacagtgtagtcaatattggtattccagcctggaatcagcaaccatctggcattgttgttacctccagtctgacgaaccgtatccacgaagatttgattgtatgcgttcagattggcgtaataggccgagtttggattgccataggtaccatcgaatacttcgttcatggattcaaaaataagacgatcattgtagttgctaaacttggtggcaacctgctgccacaccttcttatatttttccttaatggcagtctgattgccaccattcacgagtagccatccaccctgtacggaattaaacccatcaccatgaatattgatgatcacatacagaccttcattgtacgcataatccacgacttgctgaattcgattcagccatgccgcattgattgtataattgggagcgcttccaatgttactcaaataggaaacgggaatacgaatggatttgaagcctgccgcttttacctttttgattaactctggagttaccgtaggattgccccaagctgtctcattcggtgtaccgttcaccgctgcttccagctgattgccaagattccatcctgcacccatctcagacactatttgcgaagcgtccgctgctgatgctttagcgctccatcccgtaaaggctaccgcagccactaataccagtgccaagctgctgatgccaaatttcttccattttttgaacataaccatacctccgcttattctattatttttaacaagcagtgcagttaatctatgcatacagattgaatgattcgagaatacgtgcctcctctctctaatcgatcaaacaaatgaattcttcgtccaacaacaacataataacacatttatggaaaataaagcgatatctttattgttttttgtgactatttactacaaaataatccatctatccgtttaagtggattgcttggatttgttctctatcaaaatcaataatcataatgtgatcgcgcaaaatatgatctccgcaagatattgttgcgccgtagtcggttacactgttaaatgtgatatccacacgatagacttcaatctcattaaaccaattctgatgtaccttttcatgaagttcattctcataatattctcgaaagacagtctcacacgttgaaaaccacttaatgtagtcttctatattatgaacaactgaatctaacggtgtattagtagacacatatattcgaacgtcatttaaatcctcatcctgtatgcagtgtttaaatatttgtactggattttgcagagtgtaacaccggtaactatcatcactctcttcttcaagctcaatgaattcacttaacaatatgatcttgctcctctccatgcatattaaaattgctcatttaaccactttacgaatttttctttctcttcaaactgtgggtaatgcgctgactcgttgaatacaatgaagtctttgatcggtgcatccaatacgtcaaaataatcacgtgctgcatttgcagtggtcatataatcatatttacccgttacaaaataggtaggaatctccagatgatcaacaatatcaggtaaattttgatcaaatgcttccctcagtaagatgtcttgtgaactgaacatccctgagtaaaagcgaatcatatccagcccattgtattcgggattaaaaaggaatcctgaaatataatctctattctcatggatgagcctggctgcaccaccgtacttttgcaacaaaattctaggtgtaagttcctttccttgctcgatcgagctgcgaattagctccagttttttaacatcatcttcattaccagcttgtttcgcttgctcgtacgtgtactccaaactttccagttcgctctgaagtgtattagccatctgtccaatgcctatataagcgtgaaactgagtaggtgctttagccgcagctttcatcccgatgtatgtaccaaatgaatgaccgattaatataaccttctcttgacctaactccttagatacataatcccttaacgctaacaaatcatctactaatacatctgttgtgagattcgagtaatcttcaaaaaagtgataggactttccactcccacgttgatcgtaatgcacgaccgtgaagtgttgctcaagctctttctgatacttccttacgtatggaatctccgagcatcccggcccgccatgcacaaaaatcaggatagggttagtccgatcaacacccctgatcatgacttcatgtcctgtaccgttaatttcgacctgctctaacatgctgatgctgttttcacctttaattttgggtgtccatgtgggaaatatcagagctactataactattaaaataatactgaatatgctgtacttgagtgttttacgtatttttttgcgcatgtaatgctccttaaataataagtttcatttgtaatactaccaacggtttttatcgtaacggatacaacaattcaacgggttctatcatcagctcttcttggaagatgtaattgtgatcggctccaacgatacatatgaatggttccgagtatcccaaccgttgtcatgtgcccagctcctttatcatgtgtatatctttcggctctttgtcatagagttcttgatcaatctcacttgcaatctgactgccctgacttctataaaaggataccgctgatttcgtctctgtggaggagatatacagatactgtacaccacgtttcttagcctcttcacctaattggtttagaatacgttttccaataccttgtcttctgtacccgcgtgagacatacatcaagtcaacttgtaattgatttcgttcttttcctctatattgatgtgccagcacaccaaatccgattaattgatcgtgagcaaacgcaccatatgccatgccaccttgttctaattcgtacaaatatcgattttgaatctctttcaaaagcatctcatcccagtttgagcattcatgattttgttcaagttcaaccaatcggttctctctcatttcataaatgagatcaatatgttccgaacgatctatttcctgcagctgattcatatcatcaagggtcaacgttctatacgttatcatgattgttgcatctctccttccccatgttatttctaagatcctatggctttattgatcgaagtctgtatttatcaaagacccttttatcgtacaaaatagtgtattccttgttctcttcaattagttttgacatatccattggaacggctattgttctttcaagattattaaaattaattacagtcatttcattttcactaatcttttgaacagtaactgcttcaaaaattgaagttcgaaaggaattccataacaaaattaaaatcaataaaagtaatagtgacatgatgagtcccttattcttattcactagttcttttcatctcctttagtttcaaaacagagttcctccaactaaaactagcttattttaatttcaggtaactcattcaaatgatttatttcgatagtgtatttcttaagcttatggttctcaagtccatcccatctgtctgagaaacgataaaacatatctccgaagttcatcccttcaggtaatacatccacaagctttatttcatcgatttcagactccggtaagctctccaacaatttaacctcagcataagaaaccataccaaagctcccattccattcatatacaccataaggtattaattcgaagtgtactgcccctgtctcttcatagagttctcgacttgccgtgtgtaaaatggtttcccctatttctttgttgcctcctgggatctcccaacctcctcttttcctattttttataatgatgaatttattattgtatttagcgatcacaactgcaaatttgattaactccggatcaagttcatctagatcaaaccagtggctcatgttatctctcccataaacaactattctttcaatatataattgttaaaccattgaagtggtaacaagctatcatcggatataatcgttgtgaataccgcaatcaatcctcgcttttggttaacaaagatatattgccctctgaaatgttgagtctatcattttatttccaacctgtagatcacttcatcatctgaattggttctattctcactaatgaaagacatactgttatacaaattctgtgctatttcgttatcacgttcaaccgttaatgaaataaccttgcataccggatgctgtttcgtaatgtaatctagaatggctcttatagcgcgctttcccattcctttgccttgataggattgatcgatttgaaaaccaccaatccagtaattatctgtactatctggcgtataacttagataaaagaaaccaaataccttcccatcaatctcaagtacgtaaggatcaaatgcttcatcccacggttttatataggcgtaagcgatcccctcaataacagatggaactaatgagacttggtgttcatacaaagagatcttcagcgcctcttcccaattctctcgtgtgactggttgtatctttatattcaccactgtatctcctctttcgataatctttgattacctctaaggttcttttcactctcacttacaaccacttccaaatgatgttcaatcaactgtatcacttgttttttattcttcgtgattgttgcagtcttatggtttttgttaattgtacatataacttcttctatattatattgatggttccatttcacaatcatcttgcataagttcttaaatgactgcttgtaattccacggttgcaaacccattctggacaatacaaacctttttataatccgataatctctaatgaaaacatttggagctaatacaaaaatcaaatccgcttcctggatggacttaatggtccaatctttgcactgcactccttctataatccaagcctctgaactgacaatagattgaaccaattcatccctaacactttcaggatatctcagattttctgcgcttctgtcccatatgagattgtctaattcataggaatgaatcccatatttatccgacaattctttggctaatgttgatttcccactgccgcaagatccaataattcgtattctcatacatattctttcttcaaaaatgcatagatgatattatcaacaaattgatttttccaataataatgttctttcaatatgccttcttcactgaacccaattttctcaagcaactttcttgatcccgcgttctctggctctacaaatgcttcaattctgtttaattcaaggttcttgaatccatattcaacgattttctgagttacctcggtcatgcaaccctgccgccagaactccggtgctaactcatatcccaacacagctttatgatgttgtttcatccaaccatgaaatccgcatgttccaataattctgttgtccgatttcaaagcaattccccagcggatcacctgaccattttcgaatcgttctttccacctttgtataagttcttccgcttgttttatagttgtgaaactttctacatcgtagaatcttgtaacttcatctgacgaaaaatattgaaatatgtcttgggaatcactctgtttaatctctcttaacagcaatcttttggtttctagctcaggaaatggagtcatattcacttcacctcaattgagtacactgctacatttttaccaattatgtctacgttcttctcgtgtttcataccattcttttgcgcgactttcatagaacccacattgccatgttgaattaaagatattaatcgtctctgtttcaagtgatccatgccatactctttccacgcttttgcttgttcatatccgtaacccattccccagtattgctctataacccagtaaccaacttcaagctcatcattgccttcaatgatttgaggaatcagtccagaggttccaattaacttgttatcctctttattaaatgcgaggaacagccctttatcgtctttattccagttgatgaacttttccaggctttgcatggtttcttccttggtccagggtcctccatgtcttataaatttcatcatatttggctcacgtgtcatctcaaaaagtaaatcaaaatcatttttggtatatttccgaaatataagtcgttctgtctccatctttctctcaactccttcttcattcataagatgtaatcgtattcataaacattcaaatatcatagggaaacggactagagcgtgtcttcaaactcaggcaagtaaacagtgatgggtgccagcttaccgtccgaaaattgctgaagttcagagtgactgatgctggcgaatcgccaggcgattttctaaggaacacaggacatcttattcggccttcacgtcctcttttaaaattgtaaggaacatgagacatcttattttccaaaataatctgacaaaaacgctacaaaaggctattttttctggtatagcgtgactcagattccttagatttcggagggcgtttcaaattccgaaataagaggtgtcaggttcgttagcgttaacacctaacacctaaactcaacgctatgttaatgcatatcaacgaaagcatgggatctctatcaaaccttagcagttaatcccatgctcctttatcaccagaccgatagttttgtcctcgcatcattctcatctgttaaatatgctagagattcaaatccctgtttatttatatgtttatataattcctctactttttctagatctttacaataaaccgtaacgtagatactatcgatcacaagaagaaccatctgacagtcactcaaaatataatcttcataggtgataatatctgttatttgtgtgccttttggaaatgcttttaaattcgcaaatattaaataatactcgttgttatcaataagcttctgtaattcttctccattcatgcccataatcatatccggaaaaagatcatcccctaacgtatcatcaacaacgaaataggactcctcctcaccaataaaccaatcgaaattagatacttccattggttttaaaatctccccaagaaagcgaccataggcatttggtatttcaaaacgtattcctctgttcatctgctcaccctcttattattttcaattcgaagcacaataacagtacagttatttcactcgatatttctcattatttataattccacttactatttcaggtaattgttcttctgtaaaatgattagtatacagcttgttatctactctcagatcgggatgattttcaaactcatccagcagaattatacttctttctttcatttgatattcttctgctcttagacggtctctacgaataatggtttgacgatcaaccatgagtacaacatagattatgcgaacatgatagtctgctaattctgccattaatccatcaatgtcttccggaagggccacatagtccagaacaacatcgtatttataatccaataagtttttcactagactagatatatttttccaagttaagtcgtttgtatccttatcaagccagggtttacctcgccctttgaccggaaagtgactaaccgcatctccagaaatgtaggcacttttatctaaagtctgaaccagcagcttggaagttgtagatttccctactccaggggggccagatataatatataggtttctactcattctctattctccttacaatatcttttggaaacttccgatatccagctttctatcgaatttatatccaatctctttaaacagagcacattgttcataaccatttctctcaaataatgatttacttcttgtattctccatgcaaatcgtcgcaattaaggtatggaacccttgttcttttgcaatcttctcaataaaacgtagtgcttgtttccccaagccttttcccaaaatgtcgggctttagatatatggtgacttcaccacaaatgtcatatgcctgtttactcttatattgagtgatcagaacataacccatcatttgattgttttcaagaattacataagttttataccgcgtatccttgttcatcacagaggatttaatctgatcaagatctaattcctccgtatgaaatgaaatcgttgtattcattacataatagttataaatctctctaatttcagggaggtgttgttcggttacctcttcaaaagtcacagtcgtcaattaggttccatcctcttcagttcatttcttcatcgtatgtatgaaataccgcgtctagatttaactcaccgtaaatatgaggatattccctgccttcattatacagatcttcccatataactttggattttattttaaaatcccattgatcaacgcggcttcccactcttttcttgagagtacatgtacaatcatcatcctaaaatcctccttaataaaaaatgataattatttggataggaccttcctcaatatgagttctatgatttcactagtctccagatgatctgtaataatgcgagtttgaaatttttcatctttgaaagcttcaacacactttggtgcttgttgatactgccagcctccatactcatctccacgtttagccaaacgatgataaatcgtctcttctgtagccgtaaggcaaaaatgatgaatgtcctgatcgatctctttcaacccgttatagatgtaattaaagttttcctctttatagatggtcatggggataattaagtgtctgttgtatttctgctttacttcttttgccgtctttacggttagaattttccatagatcgatatcttgaaaatcatccgtacgttccctttcctctctacaattctcagggagaagttttctgagcatataacctatttcttcaggatcgtagatcatactgttggcaatcaaaggttgaagtgcttctgctgcagaagtttttcccgaaccaaacgctccattaatcatgatgatcatttgatgatttcactcccattcaatgaaatttttcaatagaaaccagattcttcacatacaatttcatccattataaatgttttccttccacttttgtgttacaaaatggcaaaaaacataatgaaatcccattgggtcaacccaacgggatttcattatagtgcattatttttcaatcaaccttagcttgttaatgtatttccaagtaatcgatataaatatcccatgtcccatcatcggctgttacaaccaactcaatgacctgatttcccgtcccatggctgatattattcagggtataaaccgctggagcgcttccgccaaagtaaaaggttcccttcgtctgtccgccaatcttcaaatcaactctagccatgttggcattgtttgaagctccacgaagcgagaaattatgagtgctcgttgcaaaattctgagtgtatttaaccaaatcattgttggcataaaggaccacaccattgaaaggagaactgatattgccggtgtattgtccacctttggtcatgttctcagcttccacttttgttccgttattcgggggattggtagtgctattatctggtgcgactgcccgaccggtagttgatgagatcatacctgagcaaaggccacgattcttcagattttgtgcaatctgcggaatggcctgaagtgtcgtctggtactgatcatgcattaatatgacgtcaccacttttcatcgtattcacagctgctacgatctgggctgcgctggcgccattccagtcttgggaatctacgttccacagtacttccttcaggccgttttggctcacaacggatttcaaggtcgcatttgtcgcaccgtaaggaggtctgaacagtttaggtgaacttccggtaatagactggatcgtctgctgtgtccgagtaatctctgacgacatctgagaactgtttaatgtagtcatgtttggatgtgtgtaggaatgattgccaatccacataccagctgctacttgtgcagaaaccagagatttattattttgtgcattttgtccaacattgaacatcgttgcccgtaagccagcctgcttcagtgcgttaagcatgtttgttgtatttccagatgggccatcatcaaaggtcagacctacataaccattcggacaacttgcatctgcagcacgagcatcaggcaccccctgaatagaaaacaaggtaccgaaaagtgcgagagatattaccgcctttgccagcttaactttgaacataaaattacctcctcatagtatattcacagcatactaccttctacactccctctctttatcgaactctcacccctcgaaaaaaagcgctttcaaaagtatgtaatccgctacgtcctttctcatagagaagagcttttagttcaaggtgagttcagtataaacgatacctctatttaaagtaaattgaattttatccaaaatgttctaatttttcacgaattctagaatcgcctgttgtacatctcccgtccagcactctcctttgtaaaaatatcctccgggggcaccatgcgcttcgggagtgtacgccctgcaataatttcttttgtagcctgcataagctgaggaccaagcagcgggttacattccaccacagcgttgattttcccactcgccagaatttcaagtgctttgcgggagccgtccaccgagacaatgataatgtcctctcccggcttcagcccaacttcttctatcgcttgtatggcgccaaaagccatttcatcattatgggcaaaaagaacctgcggccgtttgtcttccgggacctgaaggaattctttcatgacttgtttgccattgtcctccgtaaaatcggcaggagcactttgtgagaaaatgatatctgctctggtttcgaaaatgcttctaaagccctcgccacgctggatagagggtgtagaaccactcgtgccttgcagttcggcaatccgtatcaaacccggatgatttcgcatccgatcctgaatgtacttcccagccttcacaccttcctcataaaagtccgatccaatcgttgtcacaaaaagtgaagtgtctttgacatcaactgaccggtctacgatgataacaggtatacctgcatccctggcctcctgaagaataccatcccagcccgattccacgaccggtgcaatggcaatgacatctaccttttgcctgatgaacgaccgaacagcctcgaactgtttcgtctgagactgttctgcattttttatgacaagggagatccccgattcagccgcagcattccgaatagacgtggagtttgccaaacgccaggcactctctctgcccagttgtgaaaaacccaagacaatcggtttcgtagaggtatcccttgctaccgctgattccatccattcctcaacggagggaagagtttctaagttgttagacgagatgggagaaggaacagattcagactcaggggctgtgcagccgacaagcagcagtagaatgaacaaacacaaccagttcacatgtcttctcactcacgtatcccccatctccatgttacgctcagcattcaccaatgcagagcgcatattgttatatcattgtttcggtatccgtgttcaatatcatttaattcgatcaacttaatgcagtgatttcgaggatactcgccgcccgctaagaagtcgttggaacaaaataaaaacaaacagcatcaggccaatcacaatcttggtccaccatgagctgagcgtaccttcgaagctaattatagtttggatagccccctggatcaatacaccaataaaggttcccgccacatatcctacaccacctgttaacaaggtgcctcctattacaacagcggcaatggtatcgagttcaagacccatggcgtgtaatccataaccggataacatatagaaggtaaagacaacaccggcaagcgcggagcacaaaccgctgaacgtgtacaccaggattttggtacgtgcaaccggcagtcccataagcagcgcggattgctcgcttccgccgatggcgtaaacgttgcgcccaaaccgggtgtaatgtgccaggaagatcgcgagtagtacaatgaccagagcaataatcacattaatggagacaaagctgccccctggcagggaaatcttcgcctgcgcaacctgtgtgtaaaatggattcgtaatggtaatggtgtcgagactgatgacataacacagcccccgcgccaaaaacatgcctgccaatgtcacgatgaaaggctggattttaaaatagtggatgatcgcccccatgactgtgccaaacaacgcacccatgacaagcaccataggtataacgatcgcaggcgaccatccttgcttctcgaccagacttgcgctaatgatggtcgtcagcgcaatgacagatcctaccgacaggtcgattcctcccgatacaatcacaaaagtcatgccaattgccgtgataatcagaaatgcgttatcaatgagaagattaagcagtacctgtgtggaaaagaaccccgtataccggaaagagcctatggcaaacatcacggccagcaaaccgaaggtgacaaagaccgggagatacttacgattaagaaacatggcggttaaccccctgttcggctggaaacttccgttttttccaacggatcaccatggaattgcggaatgaatcggattgaatcaaacaaacggccagtacaacaaaggctttgacaaccagcgtaacttctggcgggactccaatcatatagatcgtcgttgttaaggtttggataatgagtgctccaacgacggtacccattagatagaaacgaccaccattgagcgaagtacccccgatgactacagcaagaatggcatcaagttcataccacagacctgcgttattgccatccgcactggatacattcgagctgagaataagcccggcaatgccggcacacagaccacagaagacatataccgtaagaataaccgtttttgaacgaatacctgccagttggctcgcgtttgcgttacttccaaccgattcaataaacagtcccagtgccgtttttctcgtcaacaatgaggcaacaagcagcacagttaatacgatgaaaatggaaaaaggtaatgctgcaagcgaacctgccccgatataagcataattcgcattggatacagtaataatctgtccactcgtaatcaattgcgcaatcccacgtccagctaccatcagaataagcgttgcaataatgggttggattcgggcgaccgaaaccagcgccccattccatatgcccaagatcagtgagagacctatagataatccaagtgcacccaacacaagccagagcgaactctgatccactcctctgctgatgctcatacaagccacggcaccggagatcgctacaatagagcccacggacaaatcgatacctccggtcgcaatcaccagtgtcatgccaatcgataccagaattaagggcgctccaaaattgagaatatcaatcaagctgccatacagattcccttcacgcatgacgagggagaagaaatccggagagtacagcaaattaaagattaaaagtaaaccaagcatacataacggccaaaacaaatgatgtttacgcatcttgcccgccatctctttaacctcctgccattgctttcatgatttgctgttgatggatctgatccccgctaagttcttgcacttttttgtggtcccggattacggcaatccggtggctgacacgaatcacttcttccagctcggacgaaatgaacagcacggccatgccctgcttcgacagagagagcaccagcttctgtatttcagtcttggcaccgatatcaattccacgcgtaggttcatcgagaatcaacagatcggggttcatcagcagccaccgagcaagcaacaccttttgctgattaccgccgctcagatttttaattaaatgctccgggtttttcggatggatatttaacaggttgatgtacttttcggcgatctcatcctgtttcttgcgtgagatgggtttggaccagcctcgtgtcgcttgtaaagccagaataatgttctcccgaatggtcaaatcatcgattatgccttcggttttacggttctcggagcaaaaagcaatattctgatcaattgcatgacgcggcgacttgaccgtacttcctgtatctacaacgagcagcttgcctacatctgaacgatctgcaccaaagaaaaggcgagcgatctcggtacgaccagaccccaataacccagccaagcccacgacttctcctttgcgaatgtccagatcaaatggctcaattgctcctttgcgtccaagtgccttagcggtaattaacagttctcccgactccgcctgggtagcatcggcttccttcggaagctcctcaagcacctcgagttccttgccgatcatcttgagaaccagttccatgcgtggaagttctgcggctatgtactctccttccaattccccgttacggagcaccgttagacgatccgacatttcgtatacctgatcaagaaaatgagtaacaaaaagaattgcgagaccttcactctttaatttgtgcataatacgaaacagttgctgaacctcgtttttgtccagactggatgtgggttcatccaatatgagcacttttgccgagatgctgagtgctcttgcaattgcaatcagttgttgcatcgcgaccgagtaagtctgtaaaggagccttaacatcgatggacagatgtaatctgtctcgcagaatgttctccgcatctttgttcatttgcttccaattgattttgccaaatcgcatcggctcccgcccgatgaaaatattctcagcgaccgttaagttcggacaaagattgacctcttgataaacggtactgattcccgccttttgcgcttcaagcggaccggagatcgaaagatgccggttatccatggttaccgttccttcatcaatggaataaacgccagttagaactttaataagcgtcgacttccccgctccattctcacccatcaaggcatgaatctcgcccggaaacaagcgaaagctgacgctggatagcgctttaaccccgggaaattgtttggtgatgcctgtcattttcaaaatgggtgcttgctcggccatataaccctctcctttgttatggaaaaaagtcatttagcgacagcctggtcgaaaaatgacttttcggtgttatacgaatctgcttttaatattcacgtgttggcaatgcttctttggcttgctccgatgtgaaggtcgtctcatccgtaacgattcggggttcgatgtctttcccgtccactaccgattgaaccgcttccattaattgaggtcctaacaacggattacattcaacgataaagttgattttgccatcagcagcagcctgcatcccatccttcacggcatccacagagataatggtaatatctacgcctggtttcaatcctgccgcttcaatggcctgaattgccccaagtgccatatcgtcattatgtgcatagagaacatctatttttttatgtgctttgaggaaagcttgcatgacttctttgcctttggcacgtgtaaagtcacccgattgtgaagcaatcactttaagcttcgaattggaagcaatcaattccataaagccctcttgacggtcattcgctggtgcggagcctgttgtaccctgcagctcaacaatgttgatttcgtcttgtgtgtccttgtattggtcactaagccactgacctgctttgcgtccttcttctacaaagtcggaaccaataaaggttttgtagagggttttatccggggaatccacagcacggtccgtcaaaatcacgggaattcctgcatccttcgcttccttcaatacggtatcccaaccggattctacaacaggggaaaaagcaatcaccgtcaccttctgttgtatgaaggagcgcaaagctttgatttgattttcctgcttctgttgcgcatcggagaatttcaaatcataacccgcctctttggctgaatcctgaatcgacttggtattcgccgaacgccagccactctccgcaccaacctgcgaaaaaccaagcgtaattgttttggcgctggcaggtgtactgccattcccactcgttgaagtttcattatcggagcctgctcctccattggtactgctacatgccgtgctgaccagcatcaccatagccaatgttatggcaagtccccacttttttttggttcgcatgttgtgatcctcccttttttcgtttcaccttgtggtgtgaccacattatagaacgctttcattccgagcttatatggagtctcatactttatttatgtaataatttagtaatttcaaaaaatggagtttaaaaagtgtaatttctttgtttaattgtgtagtatttagcgattctcttacatattagaaaatcatgttatactaatgatacatttttgatcccttcagatggagtggaatacgttgaaactcattcaatggattgcttcaagcctcaggcttaaattactcagcatgtttatcatcctcagttcagtgccactgatcgtggttggattgatttcttaccacaaatcctatacggtcgtatccaatcataacaaggcctcgacacagctggttgccgaccaacttgccaggaacattgacatcttgtttgaggatacggaacggctgctcgaactgggtaagaaccctcaagtgcttcaatacttgtattctcaatcggagtcctacccggaagccaaagccatccttcagacatacaatctttatcgggaaacctacaagtatgacaaggtacttaatatctcgttcgtgaatttctatggaaaaggcataagtgaacgaaaaggcgtgttcaagctggaacgaaatccgctgcgtaacccgtacttcaagtatctgatacagtatccggatgccattctgcgcatccctcattctgcaacctatgccgaatataacaggctggatgggtttgcttaccctaaacagaatgcgctttcaattataaccacggtcaaagagcgaattacgcatgaggtcatcgggttcatagtaattgatttgaatgattcattcattgatgattttttgacgaatacccccattaaggattccggttttttctatattagtgatcaatacggaaatacactcttcaggccggatgtcaccccggtatccataaccatgatggatcagatccgatcggtccctttacatctacagcacgacagctttatcctgtctgcaggatccaagccccagtttgttgtatacagcacctcaaaacagaccggatggaaaatgatcggggtagctccttatcaggaaatcattgcagaggccaatagcattcgccaattgatcatcattacggttttgttaagtgctttctttgcgatatcattatattttttcctgaataatcgactgattcttcccatccggattctgatgaacaagatgcgtaaagctgcaaacggttgcttggaagccaaagtcacaccacacggctcggacgaaattgctgatctgggcaaaagcttcaacgtgatgctggataagctcaaaatgctaatcgaaaagagcattcgagagaatgaacaagtgaaaatagctgaactacgtacgctgcaagctcaaatcaaccctcatttcctgtataacacgttggaatctattctatggatggctgaagcagagaaaaaagaaaatgtaatcaaacttgtgcaggccctctcgaagttctttcgtttgagtctgaacaagggattcgactgggtatccattcaaaccgagcttgaacatgcgcggagttacttggttattcaacagatgaggtaccacgatattctcacttacgagatcagcgttgatcgtaagcttcaggattatcccattttgaagatgacgctgcagcccctgattgaaaacgcgctctaccatgggatcaagaacaaacgcggtcaagggctgatatccatacacggatatgtagaggacaatagcatcattctcaccgtacaggacaacggaattggcatgtctgcggatcgattggcacaattacgtgaagagctggagaagccggccggttcccgttcatcccaagatgacgagcaggaaggcggattcggtctgctcaatgtacatcaccggattcgactctatttcggaccagcttatggcgttgaaatggaaagtacctatatggaaggcagcacatttatgattcgtatccccaaaagcaaggaggttaaccgttgaaaaaggtgatgattgtggatgacgaaattggaattcgggagaatatacggagctgcatcgattgggaaaaggaaggttttcactattgcggggatgcacccgacggcgagcttgcgttacctttaattcatgaatgggctccggatattctgattacggatatcaaaatgccatttatgaacggattggaactgacctccatcgttcgcactcaacaacctgatatcaaaattattattatgagcggtcatgatgaattcagctatgcccaggaggcaatccgacttggtgtgaccgagtactgtctaaagcccattagtgcagcagagctaatccaaatgcttcataaggtcagcaaacaaatggatgaagaacatcaacgcatgacaaaccggacgatcaccaaagaaaaactgctggccgatctgtgcggaggactcatcggtacaaccgatgcgattgaatcagccaaacaactctcacttccactctcggcccggtattatacaattgtcattatcgacgttcgattaacagatgactcccgggacccggaatccctgatgaagaagctgcttcccatactagaggaaactcgtgatccccacgttgaacttcttccttatattcgaagccggaccgatttggtgcttctgctcaagtatcactccaatgacagcatatccgtatatctggagcagcttcgcgggcgggttcgtatggaacttgagcatacgttcaaatgtaatattattctgggcattggcagtcaacaggagcggctgcaaggaattcatgtctcgtatctggaagcggaggaggataaatatattaatcgactcacccttcagaacagagcttctctacatgacattaacctggatgagcaaacgactctttttctcgacaggaattcgtttcttgaatttctcaaaatcggcagccccaatctgcgtgaccattttgtgcaagagtttgccgctccattacagtccttcgactggaagtcctcctcgtatggcttctatctgttgaatgatcttacgctggagtcgtttcggctcgctaatcagttgttccgcatgagtgaccattcggatgagaacattacttccctacaacagacgattcggaagattacgtgctgggaggattgcacccaatatctgtgctccctgcttaacttgttatggcagagaagagcagcatgctccggaaaatacagtgatgtcattgatcaggtgaaagcttatgtatcctgtgaatacaataacgaacaggtctcgttgaagatgatttctgcacacgtcagaatcagtccaagtcatttaagcaagattttcagtcaagaaactggtcaaacgataacggagtatctaacccagattcgaatcggcaaagccaaggagctgctgaaaacaaccaacaacaaaacctttgagattgcttacaaagttggttacaacgattctcactatttttctaatatattcaagaaaacaacaggttttacgccaagagaatatcgaactcaagggaccgaggaatcgcaggccagaccagcagatatgagaaaagagccaatgtatgaataaagccagatttgcacttttacttacactaatccttctgctcccgatgatcatttcatccggttcggcacacattcgcccacaacagatggctacagcacttcctgcgacttcacctgtagagaaatctgcagcgagcaaaacttttggtattatctatccaatgacgtatccaacctatgagatgatcacgaaggatgcaacggagtatgcagggaaacacaatattacgttaattgtaaacgcacctgatgaagccaataccgaacaacagatccgtatcatggagaatatgatcaaacagcatgtggacgggatagctatatctcctgtggatgctgctgcacttacacccgttattgatgcagcccaagctgcgggtattcctgtcattacatttgagtcagatgtcccatccagtcatcgaatcgcttatgtgggcgccgataactatcgcactggccagcagttcgcgatgacgactacaagacttctgcataatcaaggcatgattcttgtcgagaatggtttggaggagatgcaaggtttgcagcagcggcttaatggattcattgattacatccgcagtgaaacagacatcgaaatcttggaagttcgttatcatcaagggaatgaagatcaagccatgtccgatatggagaacatgattcaggctcaccctcacttcaatgcaattatcgggctcgattttgtttctgtctctgcctctaccctgatctggaaagcaaaaggccttaaccggcatttaatcgcgttcggtgatagcccaaccagtgaaaacgggttacttaacggtcaattgtctgccgttatttcgcagaatgaaggagtctggggtgccaaaatgatggagaccctgttactcgccagcgacggtgtgcctgtgaaggaatttattgatacggggatcattgaaataaacaaggaagcaattaattaaagggatgtcctcctgtcattctgatgacaggaggacacccccatttaaattttcgtacacgtcgttgtttctaccctttacgtttaagcttcataatgaggcgatccaggatgaaccccactccgccccaaaaaatcaaatggaacaagtatattaacggcctgaacaatgagttcgtctctggatttgtatttattttggtcaaccagtcattcagcaacggatttataggattcgttaggtaaatcagaatattcttatcatcgtttcctgatagattaatgaaacatacggttagcgagaaaataacaaaccaaaaagtcagctttttcagtatgttcagcatgacgagagggtaaccctcctctcaagtatgatgagtccttttgagaagtcatttcttccattcgttttctaatatgctcatctcaataagattccagaatgtatcttcatgtcttcgcgcatcacgaataagtccttcttgtacaaagcccgctttttcataacatcggatggctgagacattaaaatcaaatactcccagactgatccggtgtaacttctcctcttcaaatccaattcgaagtgcctcatcgatcatttgcttcccataacctttaccctgatacggcttgccaagtagcaccttaccaatacgccctgaacgattatatcgatcgataccgccaagagcaatatgacccacaatctcctgagttgattcatccatcactttataaatgaacttatttgaagtgttcttatcattggcaccatgcaaataatccgatagctgctctctagaaagtggatattggaactgagggccggcccactggagcaaaaatgcttcatccccactccattcgatcagttgatcaaaatcttccggttcaaagtattggaatgtaatcatgtgtatccgccccttctttttttatgtcatatcataacctatttcagttctcttgtatcgtcataattatgagtttcatcaaacgctctgtttcttatattcatttcgcgaatgtagtttctgacaacattcattgtactaattaaacagataactccacccaaaatacatatcgcggctatccaataattcagtacaagattcacttgataagcactcgaatcataactgccagctgctgctgactggaatgctgcataccctagcttgggaatcacctcttcaatcattttcgagagcgtaataatcacaattcctaccatgataaagagtaatgagaaaacaatgtgtacatgcttcaaagacaagttacctcctttacaatccaaatcgcgtgtgttttggcactacttgcatcttagaagccgaacgacttcgccatcaatcaacccttcacttacgctgtgaaaaccaagtgattcatacagatttccggcgataccattttccggcctgtgtccaatcatgattcgttttcaattcagcaatccaatatacaaccggagcgggaaaactttttttctgttcttccgttacattcagttgagtacatgcataccaattatccaccgacacactttttaattgaatcataaattgaaactcctcctagtgaaaattacacagaggaatcccactgaagacttccttgggtcctctgcgctagacaaaaacacctcttgtaacttcatttctacttttcagattcgtattgtttctcatatcacatcactcctttcatgttgttgtgcaaacctctggcaacttcaatcacctcatgctaaacctttgatctctaatagttcaggagtatgtttcaccaggtccactatttcataagatgcattatctgctaatgcatctttaactgcctcagcccctcttgtcttccagatcgaatatatacatttggaaaaaccatatgcattcatgtggtgaccacgttcctgtatatgcataaacaatttcacactttcctcatacttttcgatatccgttaaaatacatgccaaattgtttaacgcaatgttgatatctctctgcgaatttctggagacattaatatcctcccagctgccgaccacttcatcttttcttgaaatccttagtgctccatcattgatttcatcaatccagtccatcgtttcgttcaaaagagcttcgactcccgcaacctccccggcatgatgcagataggccagacgctgtttgttatatgtaatccgggcaaaaagaatattggaccatgtctcatcttcttgtataagctggttcatattttcaagcacactgtccatttcactgtatctctccaaaacccaaagcgaaccacccaatgcccgatggctctcgaatcgaacacctcggttggtatccaacttcggagcattatcgcaagcatattggtaccagtccatccaatgatcaaagtagttccccagagataatgacaacgcttgtgtcgaatccgaaacgatccagtgtaactgctccggggcgagattttcttttccccatttgaagaattcccggtgattggcataaagcggttccggctcccttaacaaggcataaccatctgaaacattccagtagacccagccttgttcatggacagacaatttcctagaatgttcgaagtttttcagtaactcaatcataccctgatgatcccctcgaactactaattcctgaaaagaatgaacgatattcatacccatcctccatccttaattagtttcgattcagctaagtcaatggcttcgtgccgcaagctgtaatgaaattcatcatggcataggcttccggcgaatgatttatcgcttcagatgcttgttgcagctgagcaaattcctccgaactgatcacacctttttcagcaaaatgtacaaaacgattaagattaaactggtgcttaaacccttctatgcctaacagatcactatgttgaaggacagaatcaatgtcaacatcgatgtatccgctctcagaaaggagacgcggcagacttctgccaattaagcgattaccaccgtgttgtgctacatagtccgaaattttcattaataccgtatgcaaagcaggaacatcaggattcactgctccaaaaacgccgtcatccacatcaataatggcaagacggccgccaggcttcagtacacgatatatctcttgtgcagcttcgtcaggattgttcaagtgaagaaagataagtcttgccacgacaaaatcaaaagaatcatcaggcagatccatctggtagatggaagactctacaaattgcaatcgcttggaaggaatatctttcagccgttctttggcttgtgcttgcagtgaacgatcaatctcaagcgaggtaagctcgctgtccggcagactgttcaatagttgctcagtaatgtaacctggtccgcttccgacctccaatacacgcattccatttttcaaaccataccactctagatttcgaaattctttggaccaccccattaccgcctgtatctttaacctctctaattcctcttgtaaacttaacactgccgtttggatactgtatgttgaacgcggatcactcatatattccctcctgttcttctgtggaaaaataaaaacatatatccttagacctttttcttccctagaaaaagggcaaccttatgttgtttctctatcgttccacctgcagcatcaatggaatgtttgattcgctctagaagtgaacgccgaacatcaatagaaagctgctgatgtttggaattggtatttaataaagcgacatattcttcgctggagcaagtctgtatccagttatactccttaacctcaatatccgtgaacaagccggatttttctgttatttctttacgctcctggataacttcatctggcgaaggatattgagaatcatccagatgaggggctaatgctgtgtagtgggaacgaatttcattgtgcagctggtcatagaccggtacatgaatcgtccagaaaagtccaatgccgcctgtattctctagcaattcccaagcccggtggtaaccaactttcggatcaatgaagtgaaaggccgttccagacacaatcaattgaaatcgctttccttcgttattccattcctcaaaggaagtgttgattacttgaatcgatggatatgacttgaatttgtctgcggtgaactgtgccaagttgctgcctaattcaatacacgtgatgtttgtataatccttgctcaccaatccgccagtggcctgccccgttccgcagccaatctcaagaatggaatcctctttattaagattcagatatgtaaaaatatcatcaaacatttcactcggatagacgggtctatatcgttcatattcatctgctacgagattaaacgtttccttattttccaagttcgcatcctccgatttcaattgtggttttcctataatacattgactaaacataccatatcttattattcttgatagtaagaggataaacctttcaataagagaatgatgatagtttaagttcaaattttatatcctagaggactgaggtgttcttgtgaaaagtatatttgatacgatcaatgctgctgaaattacagagcgcatggctcaacttagtgaaaaatccatccctgaatggggcacgatgcaggtctctcaaatgctggctcactgttcagcatttcatgatatccccttaggaaatgcttttccacctagaggattacttgggagacttataggacggttcgcaaaaccaatgttttataatgacaagcccttgccccataatatgtctacgatcccgacaatcattattgatgaccaacgacagtttatggcagaaaaagaaaagcttgagcagcagattaacatctttcaacaaggtgcttcagaaaaattctcccgccacccccatcccttcttcggaaaattaacaaccgagcaatggggtaaaggcatatacaagcatttagatcatcatctaaagcaatttggagtttagcggttattcacggtgtgccagttatgcatgctgttctattactgtttctggattacattctaaattagcaatgactgaacttcattaacccaatctccttcttcgtcagccagtaaagtcttccaaccaagtagcttagcagaatgtaaatttttctcttgatcatctataaatagaacctcttctccagctaccaggaaggtttctacccgttggtatatctcaatctcaggtttgcataaacccacttgattagagatggttacacttttggtaaatgagcttaaacggctcagattcggctcaatccattccttacaatgattgctgagtagatggatatctgcgaactcactccatcgctcaaggtattgagcggctggtaagggaacaattgaattgtataagatgtccttcgctcggcttattgataattcgggatacatctccttcaacgattgccagaactcttcttccctcatcattcctgtccagagctttcgtttgattcctgcaaaatgtactttcaaagattctgccgataggttggtttcctcactcatatctttccagcacgtcaacgacatattacttaacaaaacccctgcgatatctaaaacgatctgtggtctgcctttcattttatcgacccccgagttcaactaatacgacgtataacaggccttaagttacttaaaagcatcatgcggaaggacagcatgtgcacccttaacgccattcacaatttgggtgatacgcaggtcaattaccgcgcttccaagtgcaatcgcttccactcgatctagtccgtacaactcacccatcagattgagcatcccgtctaatgcttgaaccgtagcctcattcagatcttcatgaaacccgaaggtaatccagccggacggcgtatgtgcacgaggattggtcaaaaccatatcatcaatcacattaagcgtgacatctaccactttcatcggacattcaatggcctgacagctgacttcaccgtctccctgccgtgcatgaccatcaccaatcgcgagataacctccgtctacggggataggtaaatataatttacttccctgcaccagttccttgcagtcgatgtttcctccacaatagcgaggcggccaagtcgtatgaattccacctgactctggcggcatgcccactacacccataaacggcgagagagatacagtgaaggactttccttttatttcacaggttccactcatcgtttggcgatcaagtgtccaattcagcgacagttcttcaacctctgttagatgtaacttctggttctgccagttcggatatccgccagcggaagtaaacccgtaactcccgtacgatctcattgaaaataatccccaacgtctgtccttgcttcgcctcatcgatatagatcggaccgattaaggcatgacctccatctttttcaccttgacgatcaaaaggtttcatgcgttccacataactcacacctgttccccagcccgcatctagcgtctgaaaacgaatggaatcaccagatttcacgctcaaaatgggggttacctcattggtaaatgaaccgatcagatattcctgcattaattcaatcgtatgaatggtcatcataacctccacagtttcggaattcagctttttgcttaattatcacggtatcgagtatctttatttgcaataacgatccgcttccatgatcatatgaacttctcatcctttctaataaataactgttcaagctcttctctcgtcactggatgtaaaataatatcttgtgaatttatcattcgttctaccagattagaatctttcactttacgtccccattttcttgaaaaagacctccaatcacataccatttctatcaaatattgcgtaggcatgggcagagcttcttttgtattcctatttacaatccaatactcccaatgatgtttgttatgattttggtgatgtagccatgcgttcttccatcttagatgggtgtcttcatccttctgttctgaataaaaatgaattgcatagggaataaattcttgcggaaagaacttggatatatcatgaattaaaccttgcacatacagaccttcttgccaacattcgatcagcacgttcaatttatgctcaacaacatatagaaaatacctccagtatgcggaacgaatggtcaccatctcccataacgttgtgtttagaacagcgctgcaataatcttctctgcacattcttccggtgtgttcatacttgtatcaatcgaatagctatagttgatgtgtttagccatgatttgatgttgctcatccgattgctcttctctgcgatcaccacgttcgatgttccgctgacggcagatgtcgagggggcaatataactcaacgatatccagtggatacccttcaaaaatctgtttgacttgttcataatgcggcgcgagctccggtctttccacaagaatgccatcaatcataacatgctttccatggtctgaaaatacttttgccgtatgatacatcattacaatcgcttcactcagatacttccagtaatccgtctgaagatgtttatcaccaatcgtattttcaaataaatcattagccacaacatagaaaaacggatcatcgtatgattgcatcgcctctacaattgaagttttaccagagctggttacaccgttcaaaaatataattttgcctttttccatgatagtcatcttccttgcttaagtataattttataaacgtaatacagcatgtactacgtgtgtttcattgattttttgagcagcatgatctggccaatatgataggcattatgaatacatagatttgatacaactccccaccatggcgcgttgaaataggtagggatttcacgggtcaatttatgttcttcactatcttcgagtgccctgttccaatcactaaacacggttttcagtctatgtaatgtcttgcgccactccacatcattcaggttagacgtatctatgtcgaatgtatcctcattattcactgaattctgcccgttgacctgttcggcaatatatctctcaagccacttctcattccagaaaataagatgattgacgatcgcccaaatggaatgctctccctcattctttacataagaggcttccgccgcattgaggtctgtcaaaatatcatgaagcggtatgaaccagctcttgtcatgataacaggcgtttaattggtctatgagaatagttttgtaactcatcgttgcacctcactcagataatataaaatttatcagttcattgacttcgcaatcttcatcacaagatcttctgacatatttccgccaatgatctcgtattgcagcgccttcccattcacatcctcttcgatccataccaattgggaagtttcgtttttgaaaatataaaatgcttcgacgccacgtatggctacctgtttaaccttagtaccatcatgatcaggcaatgcgattcggctttttgttgtcccaaaaatattaactttataaccaccgtattctttatacgttatgctgatgcccacaaccctcttattgggcttcaagtctcgtatcactacatttctgcctgacctgttactttcttcaatcatttcatcgatttcttgcggagttaaattatcaaatccataaaatacatgaatggcatctatatcagaatcaatcggaaatttcggctgccatggagaataatgtttctgcagttgttccaaaccgtcttcccatggaatgggtgcataattggtctgttgcgtgaattgattttctataacatctgcggtataaatcgccttcccgtcaccaggctttaagtcaatgacgattcggtcaatcgcatgatcattgcgtaaggattcaatttgaatttttccaagcacatctccgcttttgtttttgatatccattgatcttcactcctttcctttcaaaacatcttcctgatcctcatacaatagaagctgagccctgcagaagataaagcgatcatgaggactccaaatatgcaaatggtccgcgagatatcctcgtaaccataacttatcgtttattcgtctg

SEQ ID NO: 15 - DNA, 135122 bp, Paenibacillus xylanexedens
  source 1..135122: mol_type = genomic DNA
cgacgtggaatcgacccattggggcgccagcgccattaccaatggcgtctccaaaggctatgtcgatggatacacgaatggtacatttaagcctgacgccagcgttacacgcgcggaattcgtgaagatggtcgtctcggccatggaacttgaaaccacgccatcaagcggtaaatggtacaccgagtatgttgatgccgcaagcaaagcaggcctgtacgcatctgccgatttcaacaatagcgaagcggcttggacgaaagtcatgacacgcgaagaaatggcacgggttgcagctcgtgcgattggggaaacgtcaaaggaagatgacaaatggatgtacctcgctacgaaagcaggtctaattaaaggtgtaggtatagggcagattgctccgaaagggctgaccacacgtgcgcaggcgatcgttgtaatcgaacgtattctatccacgaacactggtgcttcccttgacgtcgataagtatgcggtgagcagtgctgaaatcgcctggcacggtacgaacatcttcacggtgatgccagaaatgtgggttactccggaatccgattggaaacaagccggtaagtcttcggtcgaagaaatgtggaacgaaaagcttatgaccatcacatcgaaagatggactgtatcagggtaaacttgacgcacttatcgctatcgaccttgccgatcccaacgaccctaacctggggttaatcgctccgatcaatacgctcaagtggtacaataaccgaccttctatcactaacctgatggtcaaggaccaaaaaaatagttatgtcctgtattttaaaggcggttcggtatttaacaaagatacgaagaaatataatccttcacagcttctacgataccgagtagatggatttgatagtccagatcgcaatgcctttttccaaaaaggtgttctgaatgcatcaaccagtgtttatcgcaatgatccaactgacacccctgccgacattatccccaaaatgggaactgtacaaactagcgatttggtaattagacttcaaacaccgacagggggttcactgttcagtgaaaatattctgctccgtctcaaaggtatccgataaagaaaaaatatccaacatactgctcctaatgagcgtatgatgggtgtttttttcggagcacgtcggttgcctaaatggttgtctaggaatgaacaaaatgcactacatagggaagtccgttttcgaggagacgcaagagagcatgcgattgtgttaacttttctccggatggggctgcgggtgtttgaactttgtgatctgcagcttaccgatctgaccatgagtgaccgcaaaggaatagcgtatattcgaagtgaaggggacaaagatagggagcttccgataagttccgaactccggattgcgcttcaggcgtaactggatacgcgggacgataaaagcccatatgtgtttgtctcgagacgatctctaaaatgtacggaacgcggaatactgcacatgatcgaaaagtaccgcagatttacagggattatgcatttgaactgccacagcaagtgcggcatacctttggccacgatttgctcgaggccacgaaggatctgcagaaggttgctaacctgatggggcactacaaggaaaatggagatccgaatattgccatgacgatgatctatacgacaccgagcaaagaggatctggaggatgcggtggagacgatcagctgaactttaattaactaagtattaattttattaataaaaagagcagtattcatttcattgttgcttggcttgcatttagtacagaagggtttatacgttggatttcaataatctcattggttttattcttagcaaatttttattataaatttaagtacaaacactcttattcagagcatgttattaacggagcttataacgactgaaatagtaagtagtcataaattctatatgcgtgataaatatttaaaaaagaattcaagatggttaaggaaatgtaatagtttcttgtagagactttcgaagtaagtttgtagttaatttatttacatataggagttgaattgctatggtttcagttacgcagagagtaagcaaagttaaacagcctagaggaggctacatacggcccagagactttgaagagatagtgttgagtgacgggattgagttacatccagaagaaaacattcacgcaggcttagtaggtttagctgttgactatttgaccagatacttgtccgggtcttctgcagaggaagcctttgggatgtctctgagtggatcatttctggtagacgaagaggatatggcaagatctcttgtacaaaagattaaaggtttagacgaccagtctatacgtaatgcctgcaaacttgtagggtatgatgtgtgcgttcgtgctggcacatccgtgtataaacctgttgaagagatttgtgctgacgatgaaacggtgagtaatattcgtacaatggtaagtagaagtcttgctttttgggaagagtttggaccaattgttaaagatagttttacgttcgaattcggatacactgaagaggtgagtacgggtgatggagattatctgacagaggacactttgtgggacttcaaagtatctaagaatggaccaaccaataagcacaccttacagcttttgatgtactatattttgggcctccgttctattcataaggagtttcagaaggtacgtcgtttaggaatttacaaccctagacttaatatcgtttacctactagatgtggaaaagatcgctccggaagtggtggaagctgtaactaaggatgtactggtagcaatttagatttacagagaaagatggcggtgtgggtacattgcctaaagcttattttgtgggtgtgcttcgggagtgtagcgacactctatgagcagttgcgtagtggtaaggttatgttggctcttggagagatcttaacttggtcggcaagatcacacaatttccaaaagccatattccatagagcttttggtattcgaaagttgtagggggtatcgtcctatactccaccgagcacagggttgcttcctgcgtttggcagtgtacaatttttcccacaacgagaattgttgagagactggagaagccaccttctttgacaggtagggtgaaccgccttcctcctcttagatcaaatccgtacgtacctaaccaacttacagcctaggccctgtacatagaatttatctgtggggtggagttatgaatacaacgctgcaaccatgtgccaaactacatacttcttataagaaggagtccaagaaacaatatttctgaagggtctctcatgtatatattgacggttagcgctatgtttgcgctttgcagcagctctgtgtctctcatgtaacgaaatatctgaaataggagaaacaattgtttcaagtattaaagtatttctgcttattatgcttgttatgctggccattctgctatatacgtttttgaaaccagtagaactgagaacatatgaggtcgaatttgcagagactcaagcaaagtttgcgaaacctgggtttctacttctagcagctggagtcatctctataccagattaaagcaagcattcgttgccattaaaataagatacaaatgaaaagcttcagaaggaggagagtcaaatgaaaaatgtgtatcaagaacgatacttccatatacaacgaaataaagactggggcgaatcatatcattgggacattggatcggtcattaaggtaggtgaccgtcataataaatttatgaaaggacgatttttgcataactataatatgccgacacaaattaaccttgaggaattgaatctagatgcctctgtaagtcccttgtatttgcgtgacattgggattgtgcaccatgagtatattatcaaaacgagagagtatatctttgaaaatgaaaggttacaaatcaatccggagctgccatcgcgatttacatgcttatttttaacggataaagaagtaatcaaattctggaaagctagattactagaaaatcctaatcaacagccttacactatctatgaacttagcgtgacgggtaaaattcataaagctaaccaacaatatgtggagttaaacacgagaagccaagagtataatcatcagttggcgagagaatattgggacggtgttaatgcagataaagagggcagtgaatatcttttcgctggagatatctaagtgataaatcgtgtagatttcaatgtgggtagaaaataataaagatcgacagtgatctagattagattatcttatctacggggctataaaattaatcagaccttatttgatattattaaaattcatacactcttacttaaactaatgccagcttttttagttggcattttttcgttttgagcgttgattttgtgtgagattgacaaggggaggaacataatgtatcctcataatatgcaaataaaaatgcagaatattctttaataatggaggtagaatgagtaataatattggtgtgtatctcaaagaaaaacgtaagcaagcaaattttagaacacaagaagcgctcgccaatttcacactgcttgctcaaggccatatttctagagcagagtcttcgaaaactaggcccaatgacgagacacttatgattctggctatcgctcttggcttggattatgaggaagtattcaccaaagccaagccacgaacggatgaagaactaggagttatacttgaacaagagaagatagacaagaaattgtttgaatcagtagttgctatcttcacctatctcttgaaaaatgacgatagtaagcttcaaatccgtttttttaatggtccattaaacctaataaagggtgagataaagaacggggttaagtacaggttagaaaaagcccaagaacatttgagagatacggcttcagtaaaagaagaaacctataactacattgcacgaagagaagcaacacggatgttttattctatttcgagaggctttgcgaaggggttccgagccaatcttcttaaagaagtagaagatttcacccaagctgaacactcggattcagaacaagttcccaaagaagtcattgagttgactgatacaactagactgttttcaattgagggtgaattgctttcagaaaaagaagtatatgcgattattgaacatcatttaacttcgcggcgaattgaagaaatgtttgaccataaaaaatgaggattagttactgaggacctgtctattttattgatgggtccatctctatcaaggaaggtgaattaagatcgcatttaatcgagatagtgtagatggttataatcctccatcgaaaaatgctcccacttcacgtgattcatttgtaaaaacacaattggctgagacattgaaagaaacagaacaattggtacagacctataaccttaaagaaagcatccagtatcttctttggaacgatctctttaacaaacacacattgaatggagttaattacgatacctatcaagtgagtagtccgactaatagtaatccagtgcgatatgcttcaggtagaaaggtgctagttgattttggttacggcattgatcgggaactctttcaaccccacccagccattgtcctcggggattttaaagaattattggttgtagttcctaccaattcagatgatggatcaaccttcccaggagatttggagaaagctttaatacgaataccaactgacagacaccattcaaagaaataccccatatttccgaaggatacgatcatcaatttgcatcaaatcagacatatatccaaaaatagagtgacaaaggatctcaaagctaacgtcaaactttataatatgccaaatttaaacattgcacagcttaacgaatatttgccatacccagtattaaaccgcggagatagcttacatagggctattatggtgaagttggcccagatatactccccagatgttttatttgaaattaagcgtcttcaagagcatattactgtacttgaggcgcatgttgagatgcttacttctcaattagcaacaataagtcaagctgcagcgggtttgaacgaggaataagaatgttattcaacactaccttgacacgagtagtgtattttgataatattgtgcttgcaagaacagtattatctatattccccgccaacgatgttggttgtggcgattctctgatcgtttatacgaaaccgccgttaccttatggtaattgtgcttgaagggcctcctttaaaggaggcccttattctatttattagaacatttatatattgtaaactaaaggaagaaattagccgatataaataaggtaattataaaagctaacaaatatcacttataccttgggaggtaacatgaaagacaagcttaaaggactaattatcggaatggccattggcacagtagtcactggcgcaacggtagcatatgctgctggtggcaaaatgattgaagtattctatagtgttaatgacattaaagtggaccacatctcaaaaatgcctaaaggtgatctaaaaccctttttatataacgggagtacattcgtgcctttggcctttatgagtgatgcattaggacagcctgtgaaatgggatgctaagaacaaaacggtgttgatcggagaggatcaaggagaaacggttctatatcctgggaaagacataaaaccgatgaatactcaatctgccctggggatctataatacctttgaagttgtctatgacggaccgactgttacagataacatcggaaatgagtattctaactaccatacatatcaattttcatccaatccggacaattggatttacgacgaatattatatcaatggccaatatcgcgagttcaaagctaccgtaggattatttgaaaaattcaaaaattcacgcgatactcttacactcatcatcactttggacgggaaggaagcatattctcgtgattttaaagcaggagatccccctgttgaaatcaatgttaatttaaagaacgcttcaaaaatgaagattcaagtatcaaatggtgaaggtactgaaatgtctgctttaggtctctttaatggatatttcacgaagtaattaattcagaacaattacaaattctactctccggagagcaaaggcaggtcaagtagaaccgtgttgaaacgagaagatcttactaaacgtgctctttcatgtattggatggcttaaaaactatgttgaactaaataatgtgaatagtctaacggacatcaataaatactgtgaggatttccttgttccgattcttaacagaacttatggcctgaatttgattaatttgaataaaattaaggttaatttcccagcggttgatctgggggattatcattcacgtatttgttatcaggtcagttcaactgttgatgtgaaaaagatagaaaaaacgctaaacacatacgactcaaccggtctttatagtagttttgacgagatctatctatttatgctaggtactaagagagaatataggaaaaaactgaattatgataacttttcctttaattacaatgaaaatatcaaagatttcaacgatttatcacgtgatatactcagcaaagaagaaaacgaacttaaagtaattgttgaactactggaaaaagaaatatctgggaacaacaacattgatgatcagataaaactcataatagaggatgagttaatctcgaattattcaattttgtttagacaagcgatacatcaccaaggacataaattcagattcagagatgttattaatgcgatttccccagaagaatttggaacagaaaagttatattttatgctcaatcttatgagattgacaacaactgtttatgacaagcatgagcaactactaatcgagaatccatccgattatacaagggaactaatcgaaatctacaaacagtttaaaaagctaaactcgtatcaagatttgtttcacatgaggagagatgaatatagagagctagttagagtactcaagcccatcttaaatagggttattgtaaagttcccaagtgatcgagaaactgtgggatggcgggactaaccagaacgtttagtcattatcaatttgaaggggtgagataaaattcagcggcatcacttgttgtagatactttttttaatgggttcaaagtacaagttgaatcattacttagaaaatgaagaagtttgtccatatcaacaggaaagtgccaaaagtaatatttatcttatacacctacacctcaatcagtttcgatgctgttcagaaaaataaacaacgatgctgaaaagaaagtactataaaatgtgaaaagattaaatttttaatgccgttaatgtcgagggataagaacatagaacatattcccattgaaagacgctattttagcggcttttttattttatcggtacaagttcttatcccaagccatggacaagaacttgtaccgatcattaattagatatatacctaaacggtgagcttaggcattttcaacttaatcccattccgattaagactgcgagggcattaaattcgaacatttaataaagagtgttatccaacatgattgatagcgttatctggtaaatgacttttgaattcctgtcttacttgaacagactacaagaactactgatcagaaagaagtgagcaaggtgagaatgatctgggaagtggagagaagaaacacactgactgcaacggtatagacaaaatactgtaacaagagctatcatgcatgattttaatctactcacactcctaaactttatttttttctggacagcagcttttcctcgtttcgtttcccataatcaagcactgtaattctaaaaaccaaattaccctctttgttttttgttagcagtagtaaatggagaagaatctctgcacatccatagtattcttactattacacaaagtcaggattttgtacatatgtctaaactttgtagtttcttcgtttacagcaaataagcctcgaaaaagttcgaggctctgtcacgtagattgttccacgttagtaatgaaaagtgtttttactactggaggaactatctccattttattacttatctgttgctcagatgtccttactaagatgtcatcggcaacatttatgatcaaactttatggtgttttatgagtcgttccacttctgcttttgtcagaccggtagaagaagcaatgatatcaacatctactcctgatttaatcaatttcttggcaacatcagtagctttgttacgctctccttcttcctttgccccttcaatcatagaagcttcatcatgcaaatacttttgtctgtcctcgtataatcggcgggattcggcatcctgactaagaaattccaacgtatccattgctttttttaatacaggttcgttcatcgtcagcacctcccaattggatttatcgacaccttttaagaataatagccagttaaccaaaccaccattttctactggagtcgcatgatcgccaagcttgggcaattccagaaaatgcagttctatgtcatctatgagcgagatcccactccggtcttcacgcagatggaatacgttatgatattgatcattgggcaaaaaagaatagttcaggatgttaatcgtcacgcattttttcagcatcttataagaatgcccctcttgaagctgtccgctgtatagcttgctccagtaaaacatcgttcgtttctcagtatcatatttattgaataactgcatttcaacgttgatgagctcgccctccgctgttcttccgtgtatatcaaggatggattgcttgtcacgaggagtgtccttctcggtatatggattcaacaagatgatttctgtcaaaggcggcctacctgcctctacaaaagtcttgttcaagaaggcaagcagaacatcccgattttcttcactgccaaatatacgtttgaataaaaaatcatttcgggggtcaagcagttcattcatctgcaatcatctccattcattcatagtatatcacgcttaaaggttcttagacacacaccagacagaccaccctttacgtctttttctccattctttctcctctttgggtgttgcctctccgccatgagcagaattaacaattattctgacccgggggagtctttttatcgaacaaacgctaatattgacattatcgaacgtattttccggaagccattcatatatctttgcagcgcccgcaggatcggaacttctggaggatgcactccagccgaacaccgtggaattgtctcgtgtcacagcccgccattcttttccttctcgcaagttctgtgcactttcaatctgggcgtttgccctcaatactggggcggtagtatcggatcataaaggagccagcgggagaaagttctctttgtatatgacgatgagtggcttcagctcacggtgcttcaggtattgatgagaaaagtttattcaagctctgttcttggcgatagtattccattgggcattagttttgggattctctatctctttggaattgtcttttaagaaaacccctgatcaattacttgttcttggctcggaactcagcttggaacaaaaatttggttcttaaaacaaaaaagccgctaagtagcgactttgatattaattaccttaacctttattattcaataatgactttttcagctatagcttgtggaggtgatgactgggctataagattttttatccatacttcagcttttttattttttattgaactagcaaatttagactcggctgccccaccgataactatttcactatcctcatctttacttatccaaatttgtttcgttgcaggatcatctgggttatcttgttcaatcaatatttgattatcttgttcattaacttctataattgtaccgctgatgtccgcatctgattgagttagttcattttgagaactacagccgacggctagtagcaacaaaacgagtgtgagtccactcactagtttagccatgatcatcaccttccacttgcaatataaaaacatcaataggaggaatcggtgtaaactcccgagagacctagcgaactaattgtataactatattttgaaaaagcttgccatgtatctactccaccttgtctaactataccagtgtgggtaccttcaattcttgcatagtttcgtacaccattattgacgacattgtatactaatcctccactatctcctagctgtgtaccactaagtccagtaatgatcatatcagtcggtccaccattaatatcataactagtgtcaacaatctcagctagaggataactacttccattcaaattgtacccgtgtactcttaccttatctccaacctgacgatataggccagagtaatccgttgtccctatcgttaaagaattaccatttaaattatggctcggatttacagatgagttgtataatatataacctgcatcgaacttagacgtatccgaaaatacagcattgttcattgtaccaatcgggctagaaccgtcagataagtcataccaagttccattctcacaatgccccgcagtaacaccgacgttgttaccattggcacgaccgttgaaacctaaactacatgccggggaagtaatagcagttcctcgttcaattttttctccgggaaacaagttatacgcttgtgtttgaaggctcaactcgcctattacccatctcaccatatcttcatcgatatagtttagtatctcttccttagcattatcgtactgctcttgtgagatgtacacattaactttgttcaacttaggatttataccaaccgcttctaaccctaactctttcatttttccagataatgattcttttgctttagtcagttcttctaaagaatattttacaattaaatattcaatattttgaggaaaaacactcgtgctcattactgaactttttaattcgtttggtaactcagtaacaagaatgacattcttaccgttttcatcggtgtatgcaccagtataaatatcgctatagttgctcattaactctagctgtacgttacctcgatcaatcaatatatttgtgttaagtagactggcttcaggatattgttccgtgactgcctctgcctcagtttctaatgacttcgtgaaactagtagcggtaggtatctcccatttatgacctggatcattgctttgcactctaatgttatcgtttgatatggactccgccgcttgacctgtactaataaaaatacttaacgaaatcattagcaaggttactatcagtgataaaatgcgcttgttcataaactatctcctctcataaggtatataaaataaaacgcaattttcagtaaaatgttgcatttatttttatatttttactcaaattggttcatctaatcgagaatgggaacatgttcttgttcatttcggcaatcggtacaagttcttgtccttggctcgggacaagaacttgtaccgataaaataaaaaagccgctaaaatacgactttaatgggaatatgttcttgtccctcgacactttagtagtgagtctaggcattggctgataattcatataaattcatccgttttattccagattcaatcaccctgttttctatgtatgtgcaaagtagctagattgtatgccgcgaccaccaatttatttttatgattcaaaatacgcttcctatatgctataatcaaatggcatgatttgccttgagtgcggttagcttatctccgaaaggaggtgagcgctatgaacttctccttctcagacgtgataatgttcgcaacatttctaattgcggtactaacgtatgtagataagaagaagaaataacccactctgaggttcgcgccaaaagtgtgggttatttccgtctttgtcatcattaatggagatgggattccctactcaacaataattgtgcagggagacggtatagcgcaccgtcttctttatgtagtatataataccacagttgtttttatacatcaataatgatcttgttgactatagtcgattctaatctcttggttcgactgtttttaatgtattacccagttcaatcaatctgtccacaacagttcttcttatcttgggtaagtcactaatatgtctccaataaaaactcttgccgtttgcagttgtatatgaaatatacatcctttgagaatcagttaagatagacccttttcatgctattgtaccactccaatcgtatggagttaaagtagcttatttgctaactttttccgtttctaatcatcgttcgaaatcttgccctttccttttctgtttttgtatatcttcgcgagtaatctcgtccgcacgagtgtgatcttgttctttctccgatccttttaaaaaggcacctttaacccactggggaatatcttgagataaagtttgaaccttttctctttcaacctccattactaatctaaattttgaggtattatcaaaaataaaagagcgagcgatcggtcatatcgtcttcggatatcatcttctggattatgatgtccaccattccttactcgcatttctactcgctcgatgtgatactccacgtttttaagacctaagtaatacaggtttatttcaaaccctgcctttttggcttgttctattttccgcattgcatttttaccggcaagcgttgtttcaagggaaaagctttttccgttctgtatacattcactgaatgtttgatagcttctcttccagctgatggagaaaccgattccggaagacaaggattgatagtttttgcaatggcatccggatcaataacctctcctaactgatcgttaaagttctagttagtgtgcttttccctgctccattcgttccagcaaaaacagtcatgacgggtttgctcacgggtattcaatttcctttttgttaccattttcttcatatatgatcactgtttttctgccatccggatattccttgatcattttttcattttcttcatatacaatgggcacaccattgcttttggcctcttgtctggccgagaatgttgcttttactaaaatttcattcaattcagaaattgacatacgtttcatgtgaagatatcctccttaaacaattgtacgtatgtacgtaaaagtttcacactatatggacggatcatttttcaagtttagctaagcctttttccattctcaagaaatctttctcactaatttgtccagacagtttttgttcattcagcttattggctctgacttggagctcctatccctcgatatgtgaactacactctacctaagaggtggggtgcttcttggtcaatagtgcaactgcctcagcttacaggggagttcctcccccaatgtatgccatttagttggcgagttgcagtagattgagggccgcatttcgatcacgatcatgtacggtctggagggatgggcacatccattcgcacaaagccagattttttacctccacatttttgtaaccacaacatgaacatagctgacaaactataacgaatctgcatcacgttttgccctttgatattctctttcatctcgaactgctcgattccattctgattgcgaatacctaacgttataattagcttgttttacaaacattttttttgaaaaatcggcctgttcccgtttttcctcagcgttatcatatgccttactttttaatcgttctctctcttcgtgtaaattactttccccattactccatccggtaccatggtttggattactaaataatgagacaaccttatccagtactaacagcagaacgaatacaatagtaccaccgaccaaaagtaaaaaatcaatgactttgagccgcatcattcctcccttcaaggaagatacgcttcctttttttaataacttcaacattctagctttatctctctggcttagaatctctctatcgtattttcctgcctctatctcttcaatcaatcttccgtttgtatttgttatacgaaccataactttgttgatcaactttgcagatatcacagtaaagacaattggaataatgaatgaaatagctagatgtatgaagccatcccatacatcagatactagcatttgagatgcatacgtattggttaaattaagtagaagaaacagaataataaatccgcaaacagttccatacatactatgccatttgaattttttttcatcatcaaagggattggactgccttttaatcttattcgtaaagagctttacaactaaaatacttataaatccagcggggattgcaaatatcacaccatagataccaagtgagaaatggtttgtataagaagagtataaccccccctcaaaaatcacctcttgagtcattattcgattgaccaatttattgattgcaatggtcaaaataatcgttaggataattatggaaaatgtctttcctttcaatgtttctttcatcgtccatttgttcatctctttcattcctttactcatcatttaggtttctactcagcaaccaagttaaatatagattctacaaacgatttctttgttaaagagacctcctattcaaatgctctagtacgtacgtttctgttcctgaaaccatcagccttacatcctatctaactaatacggttaaaactagtttcttaactacctcaagttcgtatgtacttattttcggtgttttactatgtataggtattttaggacctaaatactaacaaaacagattataataagaatattaccgctatatactcatttaatataggtatatcctctcggttcaccatgggaatcccctttaatgattactactgcaggaaaaccgccttctaaacaaacatgttcccgctcaattagatgacagagaattgttaggtatatatctaatcggaaataggaacatgttcttgtcctcagcagttattttcagtccgatgtttcgcctttttaatacctagcaaccgtgttttacctctcatcttgtcagttgtcacataatattgtgaacattttcatgtattatggtacttaataaagctttaagtgcatgtgatcaatgtttagatgtacatctaatcggtaatcggactatgttcttgtccattccggcaatcggtacaagttcttgtacttggctcgggacaagaacttgtaccgacaaaataacaaagccgctaatttaccgacttcaaagaaactatgttctagtcctccgacatacactttgaaagctacttcacaatctgaagttctctccactcttcggaagctagtttgttagatttagtaaaaagttttaatcccacgccagttagaacatatctaattggataataggtgcggttcttccaaaagatttattttttgggattcagattaaacgacttctcttgttaagtaagggtaatcttaccgtttttattgctaatggttccacctaagagagccattaattccgaaacaggtgtgtacatagttagatcagtttgactgaacgttccctgaccactatacttcaggtatttcccctcgaaactcaccggaataggatcatttatactcaagtaatcatttagtgataagctataataaggttcagtaaaatcgtcaacaacattaccatatcttcgaggtgtcattagatcgctcccgatgacacggtaggcaccttggtttaaaagaccagattgaaagatatgatccgtgcccccatccaactgactccgtaatcaatgggaggagatgatccagtcgtattaattgttatgattcgaacccgtttccctgtctgagtttcaaaaatccggtattcttctgttcctttgaccaatcgattgttttcaatgaagttcacccggagtacgccatacttaccatttggacttgattgagcgaactttctcttgttaacataatcatctgcggcgttttctctagttgtatggagttttattatttttccattaaccttgatctcgtaaggatattctcccgggtaagaaacatatccattttttgaatcatattacgtacctgcttccacatataatgctccaatagacaactctggatcaaagtaattgtggtacaagtagttagttacaaaaatatttgagtgttccatgggtctttcttttgctttgtgtatcagtttattggtagctaaagaataaactaggtattctcttcttcccttctctacgacgtacatccctgtatctgggtaaacttcgtcaatcgctccatcgttgatatttcgatatgcgagggtagtaacaactttcttctggctatcatactttagaagtttttctgtagctccgcccttttatatcgcataagtgattaaagggtttttcgtgttcatcccgctaatggacttgaaatagtactcagaagaggtgtctatgaagtccagtacagtatcctcattcgtaaataaacctgtagtgtaatcgactgtcgttttcctcactataggttttcctgttccatttatcctataattgtgaggtatccactgtaggttagttttatcttttgtctcagcattcgaatcaacggcactaccgtaaacaacactgtcccaaggcgtcattactcctgtgagaaaagtaacaataataccattaataaagttagataagcttagtgttcataggacctccaaagttaaaatagtaatttgctatatacctatagattaagattgatttgaaatactccattccaaacctataataatttgtataccttccatttcccgtactaagttacaatggctgatgaacgaagcaacatcttcaccacttactatggacttaccattacttcctcccggtccgccctgcttttgtttaagtctgtagcagttcttcattcgacttatcttagtgggagactaaaagaagaactcgtattttggtctatggtgaaggttttccaggttcctgtggaagatccatctgaagttttagctaacgcaaaccgcatccagaactttcgtggcacttcctttttgaaaaaaccagaatccacgtactcttcaaccggcagattattgatgccataagcttctactgttccactatcaaagttgtttaccgttgtaaaaacgtcggctatagcttggtagaaagctagatttcttaaattatcacccttcggagttaccgttacttcgataaaaacctcatataattcctgtttaataggatatctgtaattcttgtcaatgaacatcttcccataaagatttagaatgcttgtcttagaatttgcatgggtaacaatcatcctatgcggcataatggtacccaaattattgcgtaatttggccgatttaccaacgatgcgatcaaagcttgcaattgtaccgtcttctgatttcagataaacatacggcgtagcagaagttaggtttgtaccagtcaatcccacttcgcgcatctcattcagatctctatacgaagttgcctcattctcctgtatctgctcgtaacgtgataaaataaccgctgcctctgcgcgtgtggtcgttttgcctggaccaaaggtgccatctggatagccactcattaatccggttcccagaactactgatacgaagggatatgctgatttcttcaatccgcccttgtagtattctgctacaggaaccagcgtgttttctgtatctttcagcgcttgcttgtactcttcatctttagcagcgaggcctgaactgagccacttcgccatctcttcccgtgttaatgcggtgctaggtttaaacccattcgggtaatctgaagagttcaagaaccccagggatactgcacgattcacttcttcctcactccagtggccggtcaaatccttaaacacatttgcctgatccgttttcgccgttcttttggccactcgggacagcaatgttgcaaattctgcgcgcgtcaccgtcgcacccggtttaaatgtcccattgctatatcctttgaaataacctttttctactgcggcatcaatggatgctttcgcccaatgatttgcaggtacatctttaaatgaggtaactgcagcctgacttgtgctttcggtgaatgggtatatacctattatcaatacagcacttaataagagttgagttacttttttcaatgtttccacgctccatagataaaaatcagactggtttttcctgagataagctatgtattctttcgggttaacctttaattgaatccaaccatttgtactttagatcccgttccatacttgtgaaggatctttactggctttattaaagccttcatttcacttcacgaactatagagtttcgatcaaataaagtagccataccacttacttttaaatcttctgtgtttgaatttgtagagagcggaatatccgaatacccttcatatttttttccttttttgaaggggcctgccttcatgaaacgttcgtcaaacattacgtcctcatacttgttatatgcctcgatttcaaattcaaatttagtgcgaataaagtaacctgctaatcgattggcgtcagtcagcatagaaggctcggcaactaatgaacccttgatgattatcttattctccttcacccactgcacatatcgcctcatatctgcaagcactaccctgaacccttgattatgatatgaaaatagttcattagcccactcttcatcaatcgttctgtaatcgacattaagcatcaagttatagtagttctctgtggtttgtttccactgatccataataggcttataattaaaatattcatccgacttggctagttgggctgacgtcgtatccacaatgatgttgggtttcatctcatacatttcattcggatagtcttccaatacataggggaaatccttagcgtttcttgggagattcgtggttcgaatgatacgcccccaaggatctctatctgcatttttggctttcgcagcattgtttaatgctgcaagatctaccttcagcgtttccccacttcgtactttctcgattcggtcaatgacggtcaaagcttgagcacgagtggtggtaccctctggatcaagtcttccattacccgtacccgaaagcagtccatttttcacagcaatgtatagaaagtcatagttatcctcccccacttgcccgatggcccgtgctgctacatgtaccatctccattcgcgtcatgggtttggtccagtccgaggatggaaaatcggtttccacatacaaattattcactttagctgatttgacatattcatcataccattgtgcttttgttgttggtgtccctaccttgtgccccagtgagctgaccatgagctttagaaactctgcacgtgtcactttattttctggataaaacatgccgttgggataaccactgacaatccccttattcagcgccgtctgaatgctagtcgccgcccagtgaccttgaatatctttgaatgattccccctgtgccccctttttttcatttgcatttgaaatcatctggtttgattccagatttgtatgcagagaagtaggagtttctgcatgtatctgaagtgttgttgctaagagagatatcactgcacccgtaacgactaattttttcttcaccagctctgtcctcatttctttcaattaataatcaaatttaaacttactaagttgttcaaactaatactctattcagattcacgagaattttattgatcacagacctcctagctgttttctttttactttaacggattgacaatagctactgcatagtcgtccaggtcgctatctctaagaagaatataatcagcttggctaactttaaagttcgtccaacctgtaagacatttttgctcctaaggcttccgaaacgaagcgaattgcaactatcacaataccttgacgatcctggaacggctttgcatccgggaaattcatcatcttcgtattcagtaaaacttctacagttgcttttcctcttgtttatacggctgattctgtacccaccatgctagtagtcactattcctgctaatgctataaaagaaaatttctacttttctttttaaaactctactttagtatgtacttgcttctcacatggattttaccttgttcttatgttttctactgtttataggacttacagatcctaaacacctatcaaacttcccagttatgaaaaaatattgccactatgcgtttattttatataggtatattatcccatacgccccaaaaagaaaagcttgttccgaatattaatttgaacttattaatatacttcataataatgttcacaataaaaactcagtaaagaacgaattcttaaaatcaaaaagagccgctattttagcgactttaaaaaaagggcttatcttttcaattgaatgatctcctgttcagtgagcccagttgccttagcgatcgttgatatatccaaattcaaatcgcactagtcaaatttgaatagttaatgtgaataggctgctctgctacaatagctacggttgatacaaacgactgcggcaatagcaataactgcaaacttccgcttcaaaaaatttaaattccctaaaaaaatagagccggaaatgtttccctccggccctgtggtattggttaatttatctgttaattcgttcttccatttcaggctgcttttgctttccggtcagctacactcatcattaacgtaaactagccgttagtttaatgaattgaagggcaagatgacgattagatatacgcctaatcggcaataggaacatgttcttgtccaatacggtaatcggtacaagttcttgtcctcagcagctattttcaggccgtatttcgcctttttaatcgcaaccgtgtttaacctctcatcttgtcagctgtgacataacattgtgaacattttcatgtattatggtacttaacaaagctttaaatgcatgttatcaatgattagatattcatataatcggtaatcggactatgttcttgtccctcgacacaaaactcggtatgtttttgagagtattgtcaatatgactgtgatcgtaattgtttgtattgagcacatgtttaacatcccttaaaatccctaatgaaaggataataaaataattatccctttgctcaaattgttttgtttagatatcccgtggcagttcaaaatctgcaactattccatgtaaggttgctccattactacttgcattaggacctataccaaatttactaaaagctctccaggcacattgatttgttgttttaaaatcatcttcactgagttgattaattaatcttaggtctcgaattgcacttaacatattatctcgtgcatcaattaaacttggatttgcgcgagaaagttttagactgtcaattacaattctccaagccaaattatatcctttatccttccctaatttttctactaattttcgatttaaatacattaacgtagcgcaccagatttcaccaatattatgttcatcatcttcagtgtaccgtcccgttccgagatcgccaaagtgatcgggaaaatcatcatcatacttaaattcacgaattcctctaatatcattaactacccatgctcctgtaaccactttttcttgtgtacgactgaaattctgaattgtaagagcaaagtaatcactccaaccttcactcatcccactactttgtggcatgcctaaagaattttgatccaacggtcccccaacaagtctatttgttacaccatgagtgtactcatggaataccacatcagcatctagggccgtatggcgattagtagaagacacgacacctagattcattatcggatttcttccatcagcaggtgtcctcatgtttgctgttccatagacaggtccagaaaacacatttacttttacataatctttctctagacctaatccagtagagttattatcctgaaaattcccggatttttcatcgaaaccaagcatataaaagaaatcatgcatatagttgcaaaaatagaaggcattaagtattttctgttcatcgccagaatcatctgaaggtataaatgtaaccttgccattgtccacttttccttccattgggacagcttgcatgcattcaacgattgaaacgtttgagtcacacatcaatgactgcgtactgtttcctttggtattggtttcctctacccaatcaacaggaaaaatactaggaagtgccgatgatggtttgactggatattcagttatgggtctcgggaatgtaaagagttttcgctgttccccaccgttaaactcgaacacacttccttcagccttcatatgagaacctttccttttacaaagtaaaacctcactcgattgtttctgatcagccgctacaatgaattcatactgctccttagtatctagaagggtaattgcaaagtgccaagctaaacgcaattttggatattgtgggaatatcgttaaatttgctgtgatgttttcttcaaacacccctttgtctaatactgtgtactgtgcaggggatggaaacgtagttaatactttaggggaatattctgttgtattgatttttacacttgggagtggttgcccccacccatccacttgaacttcagttgaagtctggttagcattaatatactcatttgctgctactattgctgaatccacagtaatttcaggtatgaggttgatttcttcatttatactcacattatctccaacaatgtcttcaagagtgccattttccttaaaacgaaaggttctagacatttgataaaccgggaccccgcgataaacttgatgcaaatgaacaacagatgtatttgcacttgtttcgattaccctaggatccggaacaaattccattccttccgttactgaatctctagaaaaccccaagacagaagaattatgattgaccgcttcaattgcccttgttatgaaggagtcatcagtattcgacgccgcaagattcaacattacaaatgcagcattccctgttaacggatttattgtgggttttgagttttctttcttcaactcggtatcactgaatgattcatccaatcgatcaagatgcaactcattagtaaagtggtaaattcttttatcaatttgttttatcacaattcagcatctccttgagcgtaatattaaaatttagtgtttgatcatcgaatcttattttttacaagtatttacaaagtaatcatgaaataaaatccatttaatccatttttaaattatcataattatatatattgtttgagatattaaatgcgaatacatatgaaaggggataactaatgtcaacgaatattaaatcgattttttttgtttgaccaatcattcgtcatgcttcgctatagcgagggaagtgaagtagttggagttgatttcctaccggggatcgccacattgatggaaagcttacaacattttgatgtagaaatggttgtgttcttgcctgaaacatctgtatctgaggaaaatttgaaggattattttcctcaattcaatcgcattgtcatttatcaaaataaaagcacgcttcagcacgagttaaaccgatatcttgtacaggctaattcaacgattatagtttcttccgatcgcgtcttaagaggtttagcagctgaattaggtttatccactccccatctccaattagccataaacatattaaataatgagatatctgaaatggttcagatttttggatcaaaagaacacccgcacctggcgcagatgatgatgcttctggaatagctggctgttgttttgtcaattgctaagtgtttattggagtacagggatcagctcactcataccgtccggttttgttttttaatgctgaggagtcaggacttgttggtagcaatgtatatgcatctatgcttaaagcgacaggcgcaccagttaaagctgcagtttgtatagatatgattggctttaacagtgataacaaccatctgtttgaaatacatgagggtcataatgatgaagatattcggaatgcttctgtatctatagctcaaaccatagcaaataatgctgttagagtaccatctatgtcctcacctcaatgctatcaaggtacaagcactgttaataaccccgacagaactgtattcgatggtgcgatcggtagaagtgaccatgcatctttccatcagcaagggtatgctgttgttgtttttgaagatttttttatcaatatgccatctgaacccgttgatgacccaaatccaaattatcatcaagcgagcgatttgattatcgatgcttcttatggctcgaacataacaaatgtgttagctaatgcagtgttagaactcgccagaaattaaataaggagtgttttatatatggagcaaaactcaactgtttacgtaattcgacacggtgaggcaagttctaacgaaccagatgcaccgctgactgaagatggccagaagcaggctcagcaattggctgaatttttatcgcggatcaccactattgagaatagtcgattaattagcagtccatatttgagagcaagcaaaacggctgaaatttttgcagcacgaataaaccaaacattctccaaagataaaaggctacaagagcggaatataggagattaccaggggagtaacttatttgaagatttaaagaaacatttttccgatacgaatcatagatttccaaatggcgaatctaacgaagaagtacgtgttcgtgcaaccagtctaatagatgaaataaggcatgataatcaaaaccccactttcttgtttacccatcgtttgacaatgatgatcttgtttaatcattacgatcaaaattgggattttgataagggagtctcaataacgaaccctgatgtgtatgaattaaaatttatcgatgaaagacctagcattagacgagtttggattgtgtaatttattttcaggaggagcagatttcacctttcattgttttctgcttcttcttatcctatagctatccacaatacgagtccctggctgaagcttgaatttcccctttaaaatgtttactttccataataacatttaaattcttaaattctttttcagaggcgtcttttgtatttttttctctgccggacaaccgttacgctcagttgcttagccctcaacttccctgctgtttatctgcttacatttcgacgatcaactcaactatcctgccaattagcttaatgaaacagataaattcttatcaacttgaactagttctttgccttagtcgaaaaaatctagttcctgaaacaaaaaatcgttattcaagcgaagtcttatgttcatatgcttttatctagtcacatgatctccatcgtgatactatttagataactacctaatccgaaatgacacaatgttcttgtccctcgacaccagacgctaacgttgcgcaactaatataatcgaactccctcttatccaggtaaccacgctgaataacttcacgttgcgagcttgaaatctgttcattacgattccaagtgcttcatccatccgattaagttccgcttccttgtctatttgtaaacagcaaaacaaccaaaggtgtatagctaaaactctatcagaagttccctatgctcaactgcctcccggttggtacatcagttgttttacagtcattaatcagtcataacttaaagccagatttaatagttagattgattcgacataccagcataatatctgattctatagatcactgtaacttatttccaataagcgtaaaactctttcgaatcagaaacatacgatatttcagtataatagattgtaggaatgaaaatggttcgtacactcgacgctcgtactctctcgcatccacagggattactccgctcaacatccccgttccatcaaacacacctcccctgcttgggatcgtgggactcaacattgttaatccaggaccgctcatccgtactcagtttaatgggacctatcgattctcagtggccagtttatcttcgttgccctctactattcgactggaaattttcaggggggccactaatgcaggccaacctatttatgtcgtttcgcagcctatattcacttccatcaacactatactcgcaagagtttcgaaggttaggattacaatgtgccttcccctataaatggacaactaatctattcttgctatgcaacatttgtgccagcatccggaatggaacaagccacccgcattggaccggaatgcttcaatgctgtcacttacagcgacgattaacttcaactctatatgactcctttacggaaggaggaaatcacttggtcaaaactttagatgctcggacttcccaaggctcaaacgagctgaacaatttaacccccagctcacgaatggagtcccacaattatttgctcaagatggactacaggtaagcaatccaggaatgttcatccgttttttcgggtattatcgaggtttctgccaatcaactgcctgttaacgggtattttgtcatagaagtgtaccgaggattgagcagttcacagcagcttgtttatcgtgcgggcacaatcattctggccaatgaatttttcagtccttgcgtattcagttttactggttctaattacaatgtgcctacacctggaaatggtcaacttatttattctgcgtacgctaatttcacctataatccaagcttcagtgttaacaacgttcgcctgggacccgaaagtttcattgctacagtttattccgatgattaatagctatgagttaattgaggatcaacttttctcttttgcttgattacacgtaataaaggaaagctcattaattcatgagctttctctttgttttttttatttagcaaaccaattccttacttttccaactactactcaccaccacgtttgtaatacctgctgttgtggagctgtaacgccttttgcagcttgtctggtggttttggcgggtgctcacagccccaattgccttcaagtgatttgctatctgttaaggtgtcaatactaccgttttcaattgtagataaattaaagtagcatcatcttccaagcgatgacctttcgcatatccttcaggaaaaaaaatctagtgaagctccaatcaatgttttcgggatatgcggagatttccgaggaatcgtagcatcgaagaacaactctaatatcgtccaaggaagtgataccgaaaaaatgatgttcatgcgtcataaagcgtccaatgattcttatgttgttatagaaagaatgttcttcttgtgagcaactcttcttgacctacgcaaatctcagtcatactgattttcgcacgatccagttgattgtggatgtccattaaccaaataaaatgagattccgttaggcgatgtgcctcatccataattaagataaccctttttaagcgagacaattccgctatttcttttagcaaattgacaatttgattccgcatttcatcagcttgtcttctagctataaacggaaattcatagtcatgggaagatctgcataaaatttccccttcgtttggaacttgtatgagtttctgttagctataaagattggtatgggcgcattcataaaatgtggcagattctccaaagcaaattttaatgcagtcgtctttccaagacgtggctgaccatagacaatcattcttagtaatcggttcagtacaatctttttgagattacccttcaaacggagtacctctctggtcgggagtaaataatcccctacttcaatagggtgtgttccaacaggtatcaagtgattgtttaatgtcatgttctccttttttaatacatctttgtattgaattgttttaataagcgctcataattatccatctcattgagcttttccctattcatttgttcttctcgaactttgtctaataattcattttgtgcttttgcatcttctgatgcttttttcatccgcttcatctgttggcttttgtttacttacctcttttacttgagtaattttatttattttgatttcttggaattttctttactcaataaatagtcagtctttagttcagcggaagctgattcattacacgacttgggacgaccctatcttcatagctgtcgctatctccttttagtgcgcccagcatgggcgctatctctaggggtaagggtagcttcgtttttttggttgttcccaagatggggtcaaaatggtcatctcaaagggaaagaatgggtcacccacaaattggtgattcattcccatactatgctctgtttttctcggcttgtactccccatacagcaaggagttgttaagcgttaaccagctattttggtgtccaagttcccttagcgtacgatttcttccgtttcgtgagatgactcctattaccaactgttaaccaggtcttccctaacaaaatgtcatagcctcgcatactgaattgaagtagtattggggcggattaaccaagtgaatttgacgagatacactacggtttcagaattcatttttgtgctcatatgcaagaaccacctcacagaagagacattctgtgaggtggttctacatttcttacgacactccttttggaatgacataagtactggaataaagttcctgccgagcaataagtttgactggacatacttttataatgttaaacaatactacccagaggagagaaatcattgccaaaagctgaccttgaaagaatcgtaaatctccgtatggtcaaggaactgccggaactcaagctaggggaacagcacccggattttatgcaggtccagatttacttgaagcgcttcggatacttccacgaggatgcactagagacgggcgaactagatgaaggtacttctcgtgcgctagcgcgctttcagcaacgctattcgatcggaaaaccgggggtctttgacgaggcgacccgcgacttcatgagtcaagaccgctgcggacagccggatacgcaagacccgttggccttcgctaccgtttgcccgtgggggcgccgcaatctgaccttcgcgtttggccccctctccgggcaagtttcgaatcaagttgcgcagaacgctgttcgacgggcatttgccacttggagtgctgctggggttggcttcactttcgccgaggtcggagtcaatcagaaccctgacatccagatcgagtggcggcgggcggctgatccagaccacagcatggttggtgggattttagcacatgcggacttcccaccgggctgttccatcatcgtcaacaatctgccactgcctgttcacttcgatgaccaagagcacacctggatggacggagccgcggtcaatgcatttgacatcgaaacggtcgcgctacacgagatcggccatattctgggtcttggccacaccaacgtctcaggttcagtgatgttcccaacgatcagcgacaacttcacgttgcgcaacctgcaacccgacgacttgacgggtattcaggtgctctatccgaccacacagatccgctcgcaaacggcggcgaggaacgccgatggccggctcgaagttttcggcatcgggatgaacaacgcactctggaacatctggcagaccgcacccagctccggtccctggagcaactggaactcgcttggcggaggggtcaagcaaatttcagccgcgctcaaccaagatggacgtctggaagtcttcgctattgggatagatgacgcgctctggaacatctggcagaccgcacctagcgtgggtccgtggagtgagtggaaccgtctgggcggaggagtcaagcagattgcggcgtcgtgcaacagcgatggacgcctagaagtcttcgctatcgggatggacaacgggttgtggaacatctggcagacaagacctagcaccggtccttggagcaactggaactcgcttggcggcggggttaagcagatcgtccccgcactcaatcaggatggacgcctggaagtcttcgctatcgggatggacaacgcgctctggaacatctggcaaaccgtgcccagctctggtccttggagcaactggaactcgcttggcggcggggtcaagcagatcgcctcaaccctgaaccgagatgggcggttggagctcttcgctattgggatggatgacgcactctggaacatctggcagactgcgccaagctcgggcccttggagcgggtggagcagcttggccggcggagtcaagcaaatcaccgctgcttgcaacagtgacggacgcctggaagtgttcggaataggtacggacgacgcactctggaacatctggcagactgcgccaagctcgggcccttggagcgggtggaaccgcctgggtggggtgggcaaaaatatttcagtggttctgaaccaggatggccgtctggaagccttcggtatcgggatgaacgacacgttgtggaacatctggcaaactgcgccggctagcggtccctggagcggatggggcgaactgccgcattaaccggtcttctttatatcaacaggttcggtcgaagtccaaagtctcgataatctgaagctctggcgaagaattcaaatggatgttggtcgacaaaaaaagaggttgacggtgtttagagaaggataaacaagtattcaattctcaaaatatgtaatattatatgtttttaaatttttgttattatgaccctgtattggtaagtgccgtaatgtacgatctattgttgtaccaatgaagaaagattccgtgaccgtttaagccgctgctactacgaaaggcaggatgtaactcatgaatcatcacactacattttacgtggctcgtcatggtatagcaaccagcaatttacgtaatgtcccttgaccgaatcagggcacgaacaggcccgacagcttgcggaatttttgtctcggatggaggacctgcacctagatcgtctgatttccagtccttatctgcgggcctggcagactgcggaaaccatagcggacagattgaagctgaagcttgaaccgaacgaagagcgtttaagagaacgagaaataagcgaaagttccggtagaattccggataaatctcgtgattgaatcaataaaactctggaggtatgaacctatgcaaagaatacacgaaagaagccgaatcgtttcagtagccacgcctgacatctccaatatgacaacatgcatcgaaaatgtgaaaaaagcgattctgtcgaatcaaaatgggctagtggaccccacaaattatcatcaattgcggggaagactggaggcggtcaataatacgctaccagccttatatcgggaaacggttgtcatccctttcattaagacgctggatgaacttggcgaacgggggttcatcgacattttgatccgtgacccgcaaaagaacagtatcgctagacttatgctcgatatcgctcaaagcattctccaaaacggagaaggctattacgagttggccactgatgcctttcaggaggttgtcagcgatctttacgacggttttctgagtgcgggagacaggattggagtaaaacagccagatcttagcattattccggctctagttaaatggggagagccagagagcggtccatacacttggccgattgacgcagcatccgtattcaaactaaaagcagcaattgttagcctgcctcctgctcatgcgacaaccggactcctggcctggtccagcattcctcatgaagtatgtggacatgacattctgcatgccgacgtgggtctgcttaaagagctggcaaatgttgtaagggctaggttgatcggcgaaaacatcgggcaaggcctgcctgattactgggcttcaagaattgatgaaaccgcatccgatgtacttggtgttctcaacctcggccctgcggccgccattggtttgatcggctatttccggggaattaacgcagcgtatacaggaagtgcgaagttgcgcaatcaaggatctgcttctgaccctcatgcggcagatattttgcgcggctatttgggagcatacgccaccgccctgctcaatttcgaccaggctggtgcatgggcagaaattattgaatcggaaaccgacaaggatttatcgatcatcgagcttgaaaataacgtcattgatgtcgaaattgcgaagcaatccgccagaattgtggcctccgccattatgcaaaccaaactgagtagtcttgaaaatcacagcctggatgaaattcaaaactggaacaacaacgatgagaacatttccgcatttttacgcactttgctgcaaacaacaggctcgcttgctgtagattaccgttccggcttttatgcagcacatgtcgtggcggccgccgtaaccgaaggactatccagggaagcagatttgcaaattatttttgaccggatgctctcactactcaaggtgatgcacgatacgaaccctacttggggacctctggcagtccatcatcgcggtgatattacgcgccacttgctctatcacccaaccgctcaaatcccgattcttctatagcattctataacaattcccgtcctaattgtcgcgtaggatactctattactgatatcccacaaaacaggaagaatagagctcagcataacctcacactaataatttgactgcttcaaatgtattacgaccactccgtgtgcaaagcacaaaagccggatttttgcgtttatcaatctcttaacgtacattttccgcgttcagttggctgtccctgactctaccagggtacagccaacatttcggttttatacactaaggctatatcgtttagtttaaatgaccgctaaaggtgaaccctttttctcaatccatccatttatacttgctcctctcttaactccaaatcattgtatctagcctcaatcaagtaaaataacagagccttttccctaagtttcaaatccatcttacgtgtctccttataaaatatagttctactaagacaagttttggatctttctgaagtacaaatacctcatcttctttgcataattacacaaacaagtccctttactcttcatatatattctgagtcggcgttgcaagctgcattcccttctctctttgtataatgcccctcgtcctttctcttttctatcactgaatgaacctcaaagttaaactccgtataacacatcgtaacgctttctagctgaagtgacagactaattaaagttaaattgaccaaaagcagccgattactttgatcggctgccttcttagtttcgttaagctatagtttcctgttagtttcatttgaatcctcatacatatgtaactattttcttcatttttatgattccactaagttactttactatttattcaaaaataaccgtttaatccatactctaccccgtagattacaacctgtaatcacaacaaaaccagacaaccctgccaacacctcgctttggatagccttgatttgtgcatgtcgatgttgggccaccacttcctttttagtttgtgttacgcttctccgtaactattaatgaatttatgggtaaaaaaccgattagatatacgcctaatcggcaatcggtacaagttcttgtcccacgacacacgtgtcaagttaaaaaaacgttaatcattatttgaaaaagatgaattcattacgataagccaaatttttttccggaccctcaaccttgatctaccgtttcaaaaaatcttgactggcgagtttttaagcttctacaatcgaaatatcatcaatgagccctaattgtaattcggggatttgcctcattcccaatccacaacaggctccaatctaccatctgcttggatcgtcgtggttttaagtatactatcgcaacccctggcccttggtagatttaagcgcgagcggttacaggtaagactaaccggcctcagtctattggaattcaagactaaggcggctagctctttattatttgtactgtctacttgaagggatgcggatcagatttttgccttaaacagtttctttttaagttctagcgcttactcaatagtgacagacttcacttcattacgtcttatctggttcggtagttcagaaaaactgatctatttggcaactcagttatatatcgtgcctatttttaacgagaggtgcttacaggttgattggttttgccggaaattccggaagcagatcattctctcccaacacacttactacccggttaagattatcctgtgcctctgaaagatgatgatgagcgggtccttcccatgttccgatccattctatatctaaaacctcatttgcgtttttccaatcttcaattctgttgtctacccaaccatggagcttccaaaatattggatttacatgactggaataagtatctcctaaatagtcatactgaggattatcccatctggggtcaatagcttctggattcccagcagtcacagcaggtctttgttgaccgggattcgatgcaaaccgcatatgaagatcgttatgaatagtaaactcgattcgagctcccatttcgcccaaactcatatttcttaattgttccggatctttaatttgattttctaacggcattagaaccgtcaaaaaataggaatctgattttacttgattcaaatcagaattccaagacggaggaaccggataatcctgatcactaggcccagggacatctgtccacccttcaactttaaggtaatcgggctggccgattctttcaagttccctgttaacggatacgatcatctgccgatgcataaacaaaaaatcttcacctgaagcattgtttaaaataggatccctgttttgatccagagcgggtcgaggtggttcccaccccaagtttcttaaactctgctgtgtcgagctagacaggcgaagccaattgtttcgcactgtatgccaaatatagtggtgcattcgcatgtcgcgactagccatcattaggataatttcatttggtaattgagggacagccattagttgattctcctttatgcggtatttacgaactatgacagtctgcggcttgctagaccatacgttttgcttcatcgatcgcgcgggatgcactgactagaccagatccagtggcaaggtcgggacccggcacagccggattttgagcggatcggccctctgttacgtctcgagctgttcgctgcaatatatctcgtatttgaagttggtttaagttatacgatttacttgctttataagtgcacaactgcctacgatttgaggcgctgctgccgaggttccactgaatgccgcccacccatcgcttggagaagtttcgtcgccgcgaggatgtatatctccggaaaattcattattaatttcgtctcctggttcaactggaagcataatatatgctgttcgtggaggcaaaccaactaatccacagatatccgggctttgacggtttggatataccctgctctgaaatcccctagcataaggtgttgcttgcatggtaccgtcttcccgtacaaatacgccgcctactgaaatcacgtccggatgcgtgtcagggaaagataagtgaccattgcctgcagaaaacaacactgtaatatcatgtctcaccgcattagctacagcagcttcaagcatcttgtcaatgctggataaaacactgcctctgatatcacttgcccaactacaggtgataatgtcaggattcatcgctacagcagcattgaatgcgccggcgctattgaagaagttcatcttcaccatagtggaatcaacgttcggtgccaacgagaaaatgttgactgactcgctagtagcatgtccgctttcatcatgctcaggatcagttacaccaggtccgagcacgacccgagttgaacggaaagtatgtttttcgaaaaacggatgtatataaaacccgctatcagccataaccacttttatgtcgtgtccggtaattccgctctgatgcacgccctcagcatgcaatagtttgaccagatcttgaggaggctccagatggtaataatctttcttcgaaggagcgcggaagtactttccaccatcatatgtccatttggatttaagatggtggctatcccccaagatctttttgttgtattggttttgtgaacacatatagattgttccaaataaagtattaaaatacaggaccatactaatcctattcgttccagttgaatgtaaagtgctaaaaaacggagggttttcttaggaagttgaatgaattttagtttttatatgaggacggattgttagttcagtaatacgtctggtacaggtatctcattccactttcgacctttcccaaacacttcaatcgttcctctagtttttttcaaatcttttaaattcaacctatgagcttccccaactcggagaccacagtaggcgatgagtaaaatatcgcaatgttcctgtttttatatcgtctctctatatatttaaggctttcggatagatcctctacctccaggtagatcggtttcttatttttttcagttttagactttttcattcggcagccggattttttgaggcaagttcgaaatcaatcagagccatatagaatgttcgggagttcacctataatgagtctacttcatacattaaaatcaatttaaaataaaagtgcgtcaaattcatgtttgccgctattataatagcacatatatttcttaattatatgaagtacatacacataaacttaaaattgcaaattaattaacaagcacagatcagcactaagtacgatatttgaatattctcctcccttgctccaaaatcacattcagcttccttttcttagctaaagtgcttgataacgaacttaatttatctaattcaaatacgattacagttccggtggatacctcttagcgttgaagctagtctcttaatcatactgttatcagttaatcgctcaaaagagactctcttctacacttagatgtacacctaatcggtaatcggactatgttcttttccattccggcaatcggtacaagttcttgtccttggctcgggacactaacttgtaccgataaaataaaaaagccgctacaatagcgactttgaatggagcaatattcttgtcctgcgacacgacacgttgaagcgtcctcacctgctcggacgcttcttcgcctatcgttcttaagttgtgaacattttgttcggtcattatttcgaaaaatccgacgcgttcattgtgcctcttttgaccccgatggcataaaccactccttgcgtccttagatacacatttagtgtagcatcgctatacgtacccgtggacgaaatggagaagtgacctgatgaatcaatctgcactggaattttctccagcatctttccactttgaacgctatcctgatgctgatcgatctgaatctccaattgcttgctcgcctgatctatgaatttcccttccaccaacaacctgccgtctgtgccgaattcaacaatcaacgttttgctaccaagtgccggtttaatatacacttccggaaacagctgttcaggtagttttttctcggaagtgcctgatttcggtgctccaaccaattgcttcatgttggactgcaattgcatcaaaatcactgctgcctgtgctcgagtaacgatatcgttggaaccaaacatcttactctgattgccttcagttccgcgcatgtaattatgagccagcacgtagttcactgcataggtaaaatcgaaattcacaccgtccatcgacgcgatcaggccagctgcgcgataacggttaattggcttatcccggaattcgcttttgcccggacctgagctgaacagtagcagattgcgggccttggccacgttgtatgcgccttccgcccagtgcttctttttcttggaagcatacgattcgtcatcaattttgtaggtgcgtagcagcatgataaggaactgagcttcactcacggaatcttctggccggaattttccttttgcgtccgctccagcgatgcctgaacgaagcgcccactctatcgctgcttggtcggcacgtcctgcgatatcattgaccttggccggatcagttgatgggtagctcttgctcttgaggcgctcgaatactcgtaccggtactgttcccttcacctcaccggagctgagcgttaccttgtaactgccaggcttaactgcttcgagcatgccatccggcgaaactttcagacccgcaggggaactgctggagtatgcgatcgccgtttttggagttgcgaatgtcccgtcgtcgtaagaggccacgatctgcatcggcatcttacttcctgaattcaacaccaattcgtcgtattgagcagataaacccttcatcgtgtttcctttccctgtcgtgaacgaccaagttttgcttcgtcgctgcgactccttatacagcgtataatcaaacttcaccgtatagacgctgtagccgtccagcacatccttgggatacaagaacaccgtattgccatgcagttcgctgtagtacggaacatcttgtccttgagaatccaaaatgctggcttcaaacgaatcgatggcgaagcctgctgaagcggagatgatgccacccgagtgttcaacaccgaagcggacaagaggattcggcctctcgaatccgtagaaaccaacgtccgcttctttcattccgtcatacggatatactctcgcttccgtactatccttctgtaacttcatgaaggctgggttcatgacagcagtaccattctgtaatccaatgccgaccgatgtgtactgctcatccaatataatctggcgatgataagcggtgcttagccaggcatcgaccgcttgacgtgttgttgccatattaaaagacatgacttcagctatcgatttatttggccatccagctgcctttccccggtctcctgctgtcactcccgtaaaccctggggtacccggtccctcctcatgggccgtccttcctttgaactgagttgtattgtaatatgtcgcgtgtgcttgagacgcctgagacaatctcgcatcaagctccaaggggcctacgcctaccttcgcccgaatctcattcagataagccaatccgtcgagttgatcctgtgtgaatcctccttgggagaccatcgtagccgatgccgccgatgcgtgatccactggataagccggcacgatgacagttagggcaaaggttgcagcgagcatatatataccccacccacgtccctttttccgggtattcccttgattttgcatgtctttcttgctgcgttcgcttgatttcatattcgtttatcctctctgcatcccttatttacgaattttactagtatgtttgggacgcgttcgcatccaatttcccataacgattattcaaaaatttaattttcacttgtcctgattatgtaaagcatgaatcaagaaatctatctctgaacatatattcttcaaaacatcataaggaggcaatccaagttacgtttgaaaagatgggtgagcgttcatatttctaatatttcttagcttgtgatatctagactgcttttcttgatcaatcatatttctctttgacatcctgtctatcatagacgagagctgcaaacgagtggttccagtgtaatttgatccgcatatcttttcatgaatatgggaaatcgttgcctcaaaagctttaaatgcttgatccattgatagtgttatcaatcgactctattagagatgtctccgtaattttttgatattcacctgtcagaggatctctgtaaccgaaaaaattaaaaggttcatctgcattctaatagttctcacttgtaattcgtttcatttacctaccccactattctaatagtttacttgctttagattccgtataataattatatcggcacttcatcactaatggcttaaaatcaatgaaatcgaattattaggagagtggatatactttgacggtacaacctcagacttttctcgccatttctcatagccatcaagtatccttctgggttccgcttcaattatattatgagttgcaaaggtatcatcagagagcctctataatgctagacttgtccgtaagatcaattaattttacgtaatttacaccagccagcgtttcgcatgaatctgtgaatctggttgttgcgatgacaaccgcttttttagccttatagtatctcatacaagagaaaacttcttgaacagcaataatgcctaccggatttctaccgaatatctttggcttgaatgacattttcaactccaactggatcagtaaaaacgatatcaactccaaagtcacgactacctatagtcttatagacaccagaatagcctagttcgattaataatctgtataagtacaactcaaaaccggagccgttttccattctatcaatatcagctaatgtaatatctcttagttcgtagtcctccttatcaaatacaacgatcttttgttttctcgactagatgagaagtaatatagacaacacaaaaacttaagcaataatcagcagaaaaataatatactccattagacctacaccccttctaattcccagtacaataataccatatatttcaaggttgtagatagaatttgtgatcacagtattatgcaaatcaagattttgaattcatgcaacaagctataagccaaggtctaaaacggatgatccggctaaatcgttatcttcaagcagcagaggggactcttaaagaaggctcagcgcgatgaagatgtcttcaaattggcgaagaaaacctctcatcgccggaagcttcacgtttcatctaaatcagtatcatgtataatctcaaacgaagtcgtggattgatgaagaaattcggtttggtctgtcctcatctgaaactcaaaccatacaaacgagtggctaaggcgactcaggagcatcgaatttaacccatcctttttatagagggacttcaacaaaagaatccctggtctcgctcttctgacagatatcatctatttaccttatggccactccaagatggcctatttgtccttcaacaatatggaagcaagcattccagggattggggataagattcgcattgagtaaaattagtaaacgtttcatagaggttacttttcttctctcttgtttaacttctgtttgagtatcatgatttagtatgtaagcattagctcaataagggtaaggttacagttaaagtggtggtagagtatctatattccagtgaagtcagtgttggggcatcatcgaactgagatgcgggcacataaaagatctcggctattaaataataagaaaaactttttgttctgtaaaacatgaagtccatctcaaatgagatggacttcattgttcatactagtttttattcatcatattcccacttcagaatgtctttagcctccttgatcacttttccttttttgttgatgtaataggcctttccattcttataaacgatagcttgtccattactgaagctcgttacactactgtaaatcgcggggatgaccattttaccttttttgtcgatgaagccgacttttccgttgtgtagagttacaggagctaacccttccgaataaaaaaagatacgagcatacttaggcttcacaacaacttttcctttttcattgatgaaaccccagttttttccgattcttactccaaccaatccttcatgaaaaccagtatcatcaatttcgtcaaactgcggcttaattaagtaggctccttttttattgataaatccatactttccattgatgctgactggggctgcccctttagcgttaaatggtttggctgtctgaaatttagccggaatgatgatttttctgtttttatcaacatagccgtatgtcccttggctactctggtaaacataaagcttttgattgtgaggatcatcattaaagatttttagaatactaggttcttcagattcaacgataaattcgatgataaaatcgttccatacataaccaccgatttcatataccgagagttctagcaggtatttcccaggtttcacctttggggcgaatttgacggtatacgaaaacgcgccaccttcgcccggaagcaattttagtattgctggcgagcttgtgaccgaaaccatgtttcctccagcgtgaccccaaccggacaaataaacttggggttttagatacatcgtttcgttggtgttattggtataatgggagggaatattgagtttcttcgcttcgccaggttttaatttaatcgtttggatcgctttttggcttgcggaaacttgagtaggaatgcaaagtacagataatagaatggtaacaatagaaagcagtaatgctaatctcaatttctttttcacgctgaaacctccagttgatttttcattaaactctgatatatgtaaacttctaacttataaatgagcaatccacttctagcaaacagtaaaatcaaaaagatagctgcaagtagcaatcccttattgataatggctagttatatacctaatcagggccagaagagaaaacatgacgtcatataaaggtaacacacctaaaagtacgccattttccaactatttatttttagaataacctgctctacttctttatccaaatggttatggcgaagtcttatattgtagcttggacgatcaaaagattcttgggagaagtggttggttgggcagacatctgacttccgttgaccatttttggtagaaggcagatgagataaacgcgccccagtccttcctttcctttcatttcaataaatttaatggtacatcgccttccgccaggcttacatactgattgactaagaccatttgcaaactttgcataagaacccaatttagtgtttatttacttagattcactttctccctcccctctaggtaatttttaacatgaaacaatctttaattatattttacttattcaaaattatcaatttaaaattcactattaaaataattaatctcctttatatctacgtaacgtgacattcaacatatacattgttataagcatatttagaatgtgaaatacctgctttaatattattgtttcaactacagcaacttggaactttcccggcgccacttcatatgtaatggctaggaggtcctccctccccaattaaatcataaacctgggcgaattaatccaagcgatgaattgtggaaagtcgctgcggtttgaacggttcaagtctgatcatgcccatcctgttcttctcaatagtctcgacccctgatatgttcttgtgtatctcgaagcgttttcgcaagcaattggtctctaggtacgtatgtgtcaactagctcatcatagccctcgggaagcgggcattctctattaacgtacttcttatttgtcatgaataaacctttaccaaagtgagtgtcaataattccagcagagtaatctacaaagactcgttcaccgcaatatttacattttgagaatgtagtagtttttttatatggtgcgcagtatgtagcagaacatttgcaagcaattttgaatgtaaccctaggtatgggtaatgaaatatccgtttcaagtaagttacttttatcatgattcaattctgtttctgtaatatcctctttagtttgggaactgttaagggtatcaagttcaatttgctgttcggattgttcgagtttaaaatcagctaccagagttgcatttaatccgaaaatatctttaccaacggaggttataaatcgagtctcgttgttataacacgtaatccactcttcagattgctctttagaaagctcaaccttacccttaacaccactatttagtgtgtaaaccattatattaagcctattatcttctttcatccaatagctcccttccctttttttatttggttattgtttctctaatgttcctctttcgtatgcttcatatccctaactgtagttaaataaattcactatagatttcagtatagtatgaattttaatcgattgattatcgcctatcccccacctacgaggtttaggattcccgattctttgttttatgctgaaggattatattcagttacctatccctcccctatcgcctcttacatcctaacaagcagatatatattacagattgagtattttgtagtgacctggttgtacctgctcatagttttcataagaagatttgtgatgatgtgcagtgttagagcagcacctagaagtaatgtgggttctaatggtggattcagcgaaaagtgtgttcgccctcttcatataatctatcacttccttaggtgtaaagaggagaatccctttagctgaaacaattgctatagtatccctcaaaatctcttctctacaatttacccctcccatcggattatctccattaacgatttcttttatcttaacatgacttatctttcagaagaatataagttgtgtatcatctatgctcttatttccccattcaaatcctttgtttttattaattagacagactattatgaggaaacgaggtgagactattgttgaagaaggaactaaaagcccaagctaaatcacgcggcattgaacttaatgataaaaagattgaacgctacgttggatatggactacttataggcaacaaaacaagtgaaggaaatgcgagccgtaccggtgtggtgaaactgtttgatgagcgatccatagatgctatatgtttaataaacgaactgaatgaaaacaagaatattagacgtcagcaggattacatctatgttttgttctggcgaggatacccggttgatctggagaagctacgaataagattattagagtatcaaacaaagttgatacagtggttcgaggatagatcagagtatacttacgatcaaagcgaatttatggacatgattctttcggagaatgtaggtaagctacctaggaaagttggaagaccttctaaacagttcttagctagggaaaacgtagaatttcaagaaactgcagatgcactgtttaaaacagggaaattatttagggagttactgaatggaacgattactcaaggagtatttcgtgaattcattcaaagtaagagtacactatcagatgaaccccatgaagaattactacttcaacatgttaaccgctggattaaagagaatgcttggatgaacgctattaagacgtcgaatgttcaggactacaaggattgctatgaattaattgctttattaaaagagtattggttggtaataaaacaacagtatggagacatttatagcattccaggagttggagatatcctaaatatacttgaagaacattttcatatatcaaagctagctgatcaacctttcatttatagatttgtaattctaatcttcattagtggtggatttagccgcaaactaacagagtttttatccctaccttcagtctatcaagggtggaagtctatagtgtctgatttaggttccacttctggagaggaggtgagaatcaatggataacatcggtatagcactgggtggaggtaaagccttttcaatccccactgggtttgtcctactaatcattgcgcttgtaatatttggtatgtacaaatttggacttcaatttaaagaagaattggcttaattaaataacaaaaggactaatctaatatatgattagttcttttgctattcggctttaatatgttaaaaccttaataaactaccacggattaacctgttaatccgaactttaaagagctacaaatcacagatacaacagttttggcagttaattcaaaggctaatatgtgagctaccccgtcatcagctggttaattgctgcttatgcttttatccctagacatttattccagtagtcatcctgcaagtagacggcggtcgtgcatatatctctgtccacttttcactgcactctagcagcttaacaaaataatagtaaactgcatttagatcgaagatgtggaaaatcaacttgtaccgaataaaaataaaaagccgctaaagaattagcgacttcaatgggaatatgttttagtccctagacagcatttttttaattacctattgtaattcatatcataaagggatgaataaggattgattttgaataatgtcacaatactctctttatatctaccgtcttatttttgtcgagcagtaattgtaactgaactattctttggctcttacttaggagagagtttatttgagatagctcattaataaaatttttcgtcttattaactacctctgtgataaacttctccctattgacttggatgtctctccattcgggataaactcgatttgctaaaggattggtaatgagatattcactaatgaggcagtcagactgaaccacactcactagtaagtcattatcagcataagtaaacttattataggattccgtatcctttatcgctacatacttagtatcatctattaacagacatacttctaataaattggattaccaagttgagataatttcaaaaccttcttcaccctcgcccagttccctattatggttataaccataatcagcggaatgcaggtttagttgaaagaaaccttcaattcccccttccttttcaatttgctctaggttcatcgttttccagtaactctcatcaataataatacggtaatttatctcaaacaattttgactacctcccgaaatcacccagagttaacttaggttggccaaacgcagtatcaaatttcccatctttgaatagtctcgctcttatcagagtaactataatagccatcctctctttcaaatattaaggaataccaaaacacctagaaaagattagtcctagatatatctcaataaaggataaaaaagtccttaaaaggcatttaataaatcaaggtctcttcctcaggcactacataattaacttctctctacactcgaaacccaatttttaaagcagtcgagtacttcttccaaatttgttgctccacctgcaccgtgaaacactctatccctcacaatacagtagaaccaatcttcttcatttctctcttcttcgatcatatcaaacggaacatcctctaaaaaagtatctgtcaaatcgattttgacagaccaaccgggattatccacagtatcaattttaacaccgtatgaatgctcccaatcaccattacagttttcaagataccagttttgaagccattttaatgtgttcatcatctctacctcttctgcggaatttcatcttttcctgccggtctaactccctcaggattgatttatctttaacacgaggtgttggtacatcttgttttgttaaattgtttatatgtccctttccttttccatcaagtgggcatggttatctgtatttctgctctatatagccgaaacccaatccttaaaaagctaaacgaccattccccggtggaatgccgagaaacggtcgcagtttaaattccgtgttttttgtctacttgacagggttattaccataaatagcgacattcactgaactaattatattgttcttatacaattttttctaacgacaatataattagtgttctatggctaccaaatacttttcatttccttttttattgatcaaagcaacttcaaaatcagattcccatttaagttcgcctaaatgcttagcataagcaaattcatctggttgttctgatatgaccttttctaaaagcacttgcgtaccatctcgttgtagaatagatatgaatatatccatgctttctacattatgatggcatataactttagcattgtacttcttattaggactctttactgtttttttccaagtccattcatttacataacctaactcttctatttgtaatgctatttctctaaatggatcaatcttccaaccattacgtagagcaagtttctcgatcccgtccattagtagtcgaagcgtaaccttttttttctccaactcattttttgcacgaaagtcattcaaattaaattggattggtgccgaacacacacctgaatcattaacaattctttcgtccgaaatgttttctacacattctattaggactttccaacaatctttcgttttatatttcccaaataaacgttcaaacatcgctgtaatacagcgagtttccaatctaaatgaacgtcttttccatttccaattcaattcataatctaatttagttgcttcgttgtactcacatttttgtgttttcattatagattcaatgctttcatcattcgcaatatatggtaagtctaagtcaaattcttttaaaaacatctgaatctctcctaactttattcccatgggcgtggtctttgatgtttactcattgaatttcccttgtcccatagtttttgagcattctttttttcccattcgagggcttgttgtctgttacgcaatttagatttaactactcttgcttcatacttattagtaccagcatttttattccatttgttgacttggctgtttgctcgtggagaagtcccatttttatttaacttttgtccactaatccctgttttcacaacatctcttgttgatttctctgatatttcatatccatgttgtgtttttttacttgctttactattaccatgagttgctttttttatcgcttttcccgcagcctttttagcagtcttcttaacagcagctttgactacttttttaacgactacctttacaacaaagacgataacaaatattataaatggattatttccatcatcatccacaaatgcaactggattatttaatccataactatatccattccgattcaacggattatccagatccatatcttgttctgaatccagagaaataaaggaacctagttgcggattgtaatttctggtcatcagataatataagccagtttctgtattgtatctataactagcataacggtatggattttcatccgcaagcgagccactctgatttaaaatattcccccatgcatcatattcatactgagccacttcgttaccagtttgatccgttaaactaacgacatccccatgaccgtttaagtggtaataataggtatgcccatctttagtcattgctaccggacttccactatcatcccacgtatactctcgaagtgttttgttatttccatccgtttcatagatgacttcatcgccatcgtagaagaaattcactgttccggactgaccagtggactgaatacgtcttccattctcatcataactgtatttttgtattctctgtccagcttgatcttgcacttcaattaattgatccagtgcatcatatatatacgtttgtttcccatcgtttaatagatttccattattgtcatactgataagcttgcccattaacagaagttaattgattggcgttattgtgttcgtatacagtggtttgctcttgcccattggtgacaactactttttgtgtccgattacctacatcgtcatagcggtatttaattgtcgtaccatcgggtagagtttcttgttcgagttggttaagcgcatcgtactcatacgctgtatcacctaattctgaatgaattgtctttacattctcattagagtcatacgtgtattcgtactcgcgcagtacacttcctgtgctggagtaatcaccgtaagtgcgtaactgttcccccgtatcgtagtcagccttggttacaattccgtttgcccgatcggcttgttccattgcagccatatcactgtactgataagaaatgaggttttgattatccttgctaatgcttttgacttgatctaactcggtgtaatcataacttacagtggacgaatgtgcaccggttgcatatgaaagttcctgaagtccactattcgcattatagatataagacttttgatgtcctctatctacctctgtttcaggtaacccatcaggcttatacgtaaaggaacgagcaccattgtttacattgaccagtaatccattttcatcatattcataagaccatttttgttgcccatctatacttatagttttgagttgatccaaagccgtgaatgttgaagagattgtgttcccattaggagtcgtggtctccattaggttgccatttgaatcatatttgttatctgtcaccttgccaatggcatctgtctttttcattaactgattttgaccattgtattcatactgaactacagcctgttttggattaatcgttttagtcaagtttccggctgtatcatactcatacgttgtctctttttgcttgggatcaattactgatttcaggcgatttaacttatcataatggtaatcagtacgattgttatttccgtcggtatttgcggtcatattcccaaccgcatctgttgttactgttgttgtgttccctgctgcatcaattaccgatttgatatcgttacctttatcatcgtagctgtacgtttctattgattggtccggatacgtcgtcttttttaagtttccataggcgtcatattcataacgcgtaactttttgcttggcatccacgatggttgccaaatcaccagctgcggtatacgagtaattggtaacattttgtctaggatcaatttctttgagaacatgattcaggtcattgtactcataagttgtaacatttccaacctcatcgatttgagttagaacattacctttactatcatatgtctgctcagcaacagttccatctggattggttactttcttgacattatagtttgcatctaggacaaactgagtgatttcacccttggcatcttggattttctccgccacaaagttagcgttcagcgtatagtttgtcgtatggccgtttgcatttgttacgtctgctgtacgtgcagtggtgtcatatttgtactgggttgccggccggtcacttgcatctgtaaccgaaacggttgaaggttcctgcaccttaaccaagtactcttgatcataggtatacgtggttaatcggttattcgggtcaaaaatggttttaatgtaatttccaccataactaaactgtgttcggctataagtgccatcctcactatactgatctacagtaactaactttccattctgatacgtataatccgttttacgcccttctagcatggcataatcaactaacccatctgaagtatattcaaatgcaatggtacgtcctgatgggtcctctatacccgttagtgctccgtccccattccgtttatacgtaattcggtttccatgcatatcttgttcataactgagtttggcttgagtgatgcttacctgatcatcgttagaaaccgtatcgaaatgcatcaagtatccatgtttgtccgttaagtcataacccgtcgtggccccggagctacttttcaccttttttagtgtcagatattcgcccgctgaaggcgtatacgtattgtttgatgcgttatatttgaattcataagcagatccagtgtggtctgtaaacaatacgtctccggttttgtaagcatctacgatggtttcaccacccgtataataccatccgtagccaaacggtgaagactcgctagattttgaattatatgtccgcatgaagtctacggaggtatctcctctacctgttaaggaataatcattaaactggatgatattgttccccgtgcccaaattggtataactagttccgttagctatcgggtgactatcatatgtccaataatcttttagaccaaggcggctagcagaggtgtatgtcacgcttaaaagcggggtgtaatccggattggccgtgtcatcaccggatataaacttcttgtagctgttagttgtttctgaattgcttttcaacataaaacctttgtttgttgtagggtcatttatccacttttctaacatattcgcaggcaaagaccacttataatttgctgcaagtgaggttaatggacctactgcagttgtagccacctgcgaagcattgaaatctccaccctgtttactccacaagtttgtagcatctgcatacatccaagatgcagaatattccgtccaagctttatttacactatttagtgtgatatctacattggtattatttgaaacggacgctaaccagaggttcaagtcagccgttaatacttttgccccctgtgggatggtcgatgtatcaaactgaatgagagaacggatgacattagagctagtagcgtctttatatagaccaacacctagtgtcgtatcggttgctccggtttgtttggggaaagcactacgtatattggtatccgctaagcggtatgtcggttgaaatttaacaatggtcggatcgatggtgactgggtatacacgtgacgcatcattaagccatgcgatacttgggatcacgtcaatgtatagctgtcccttcttctctttcaattcatagtgaatatcgtaggaaagagattcttcagggtaagcattgactccctctacctgctgataaccttcgggtataaaagagtcatacattaacggtttatcgatgatatattcagtatcgccagtagatgggttaatcaaggaaacggagccatcctgttcctggcgataatccagattacctagagttaaggaaaaggagtacattactgactttttgcctgtcggctttttgctgagtttaagctcttctttgagtctatcgtttcccagggtataaattaaatcagtatcgggataaagccccttatacgtcattacattattcttaacaatccctgccggctttgtgctagagatgctttgcgtagttgttactgtatttgtttccgatatggggtttagtccaatgcggaatttatcctctttgatctctatcaaattatcagaaacagaatgcttcttgttcatttctactttgaattcatgatcgttattgtaagccgtttgactcgtcgtgtttaaacggttatcaatcggcttccactcttgatttgagggatcttgatagtgaatgggagtttcagaaatttgagttgtgtacgttccattctcatttgcgaatgtcttcgatttttcacttcggagcgaagcaatctcttttggggtgttgttggacgacaagttagaatcgtctgaagtgttgctttcttgaagtgttgatctttcggctgaggggctcccccaagcagtggtattatttagcgatgatgtagaaatcaaggagccagcaataattaagctgatcaccttattccaaaatttgtatttctttctcatgttgtatccccttgtctatattttcacagcaagaagagttataccatatcattggaatattttctaaatgaaaaactttccaatgttaacctttcctccatatatttattatattctgggccatacacctctctaacctaaggttggcgaaataaattaaaagcaactagatacattccctaattggggataagaacatgtttttattccaaatgcctctgtcctaattctcttgctcgttaagcaacctctgtattatcaattcgctctggattggaatttttttcagccctatcatatctctatttctcgtatgcttctcagtagcttcttgttaaatataatcaaacacaggcgttaccttttaaaataggtactcattaaactgaaaatttgttctttataaaagactagggaagatttttaaagtcttgtttatacccctggcacaaaagaccaaagcaacgtatgggatcctgaaagatgttaagactgatatttcggaacagacaaataggacggctccgtcgccgtcctaaattgtgtgaaatattcaattatcgtcagactctacgagacagactgtacctaccgttttctaaagagtcacgcattcaagctaatcaaaatattgttgtttgtatagcttattcatttcactttgaaattgaatttaaatgatcgcgtaaacggtaaatcattacggatgcctcagcacgtgtcagtccgtgtttcggacggaacgtattgtccggatacccttgtacgaatttctgtcctgttgccatttttacatccgctaatgcccatactgcaatatccgaatcatcagagaatcgttgagctgtagttgaaggagttatgcctcccttaatcagcacattgaccatcatcttagctgcctgttctcgattaattacagcattcggtcggaattcatttctattgaatccttttgcaataccattaacaatagctgcatttagttctgcactataccatgcattatctttaacatcctggaacggcattgttatggattcatcaggactggcgtttaggacacgcgcaattaatgcagcaaattccatacgtgtgatctctttatttggagcaaatgcatttgtgctaatgccttttataacaccatctttcgctaaggtttcgatctcatttttagcaaaacttgaatcggacacatctttaaacacacccgataccgatccagactgctcattatcctgctgatctcctttaacaacatcatcaggtttgtcattttcaggattgtctgaatctttatcatgatttgtcggaggggttggagctgaagggctgcctggatttacaggttgttcctgtttcgtggtttgttccacttttatccccttcgtactctctcctccaagatttacagccctcacttcgtatacatgctcggtattaggtgtaagatttttatctgtccaggatttttccccagcacctacacgtcctacttcctttccagctttataaatcacaaaattagttaagccttctgtcatcacattgctgaagttgagcgtaatggatctctctgaagcactagactcaatacccataggcactgatggtagggtccacacagggactgataccggtgctgatggataccctgctgcattctctgtaacaatgttcaagatagtttttgttccttgctctagcccttccagacggatcggcaaggtatctccacgccataattcggttccattcttatccagaaccacatactcacttgcttgctctacggcttggaaactaatttctgcccaatcatcccctgatttcacctctggagctgacacttgcttcgttgccgttaatgcagtcagtttaacgccttttccttcgccgccttcatttactggcatgatctcatactcatattttttacctggttccacctcagtgtctgtatagctcacttggcttcctgcttctaccttcgtaatttgcacaccatttcgtaaaataacgaactcctggatttcctgtcctgctgtctcgatctccattgttacggagtgagacttcacatcagtaattttgacattgctattgttcagttcagctcgagtcaccagtttcacaagtacaccttttgacgcgtggtccgttttattgaatgctgataacgttaaattatacacatatcccacttgcaactgcgcaaggtgtgcaacgggttccgatccgctgtaatacacttgacctgatgttttatctgtaatctcgtatcgaaatgccccctggggttcagtccaactcaatgttgcatctgaattttgtacatccactcgttctagttctggcgcttcggttcgggtactccacacgatctcagattcagaacctatgccagtcgcattttcggttgctactttaaagcggtattctgaccctggttgcaagtccgcaacgtcaaattctgatcttgttacatccgttctattaccttgctcatccgtgatccagtagcgagatgccgttttatcttcttcccaggttaatgtcatccccgtttcactgaaagtcttcaccgtcagtaatgctggtcgcaccggattagtcaagaagctgaatgctgtcggttcactccaaccggagctattaccagcttgtacggtcccactatattccgtgctaccttgaagcggtgacaaaacatagttgagatcattcgtcaggaattcctctccattcagttcaattttataatgggttgcacctgtcacggatgatatgttgaattccgcttctgtttctccaatcccagtgacttgtacagattcaacattactcggtaatgtcactgtccttacaatcttcgcttttcctgcacctgttcgattgaatgctaccagtgacacgctgtattcctttcctggttcaagtcctgaagccgtatattccagatttggaccttgatactcggcaacaagattttgttcgagatcatacacctgaaggatatacttgattccgcttgggacgccgttccattgcgcagtgaatcctgttgtactaaaaccgtgcatttttagggagttatcctgttcaggcaaggtcattacattcaaaggttccgagacatcaccttcgcccgtttcatttccagctgccactacgtattcatacgctgttccagggattaagccggtatctttatagtttagatcccccccgttatacaagagctcgttattccgatagagatcgtaataggttgccgttgtaacgctctgccactctgaatttacggtatcttctttaatctcgattgctgtaaaccctgttggcgcttccggaagagttaaaaatccgacacttgtagccaatccctcaccactatcattaattgctgaaacttgtaccgtgtagctgcttcctggaactagtccagttaatgctttttgagtgcttgcaactaatccgttttctatgatttgaccttggttatcgatcaactttaggcgataatcggttgcagttggtacagaatctatgttgatcaacatttcacctggtgtccgaaagacaggactgatctcgactccaggactagctggatatgttagtgcagagacttgtgtctccgctgatcccacatgatttcgaatcgtcagctgatagttataaatttgaccaccttgtagctgctggtccacgtattcatgaaccggatactccaatatcttctctgtaccggtattcatgtttttgatggtatacgtgtagcctgatgtgtatcgatttccgccaggtaaatcccagcttagtttgacttcagaagcactgattgctgttgcttccagtgttggggcatcgggtgccttctgtacttgatatgggttggacgtatgtgtaccggtgtttccagcgttgtctttcacttgtgtatgcacataccagataccttctttgtcctctatggtcactttgccgttgtctggcattacctgccatgcttcactcggttgtccgctttgactaatctctacatataccggttcaattacacccgacaacctatcagatgccttaatttgaacatcggtaccctgcagcgaccattgcagtccattaggtgcataatccacatcaggtagttccttgtcaattcggatatcaaattgagtctccggactgatgagccctactgcatccacggcgcgagctgtaattgtatgctcacctgtttctgtaatggtgccactttcacccgtagtgtaaggactatcaccaattttgtactcgtaatatacatccgatgcgtcttgactaccatttagttggaatgtcacatctttgtttgtccattgactctctgagagagtataactcggctctgttggtgcagtgcgatcgatgaggacctttgcagttgcttcagggctgatattacctgcgacatcaatcgtccgcgcccatacttctgtttctccttcctcatcgacaatcatttccccattatatgttgtccaatttcctgtccctactttaacctctgtccgttctgccccacttaggtcatctgttccattcttcagggtaatcgttaccggatcttgtgtataggattcctcagacaaactcaacactggtgctgtgggtgcttgcttatcgactcgcatagtgacttccgttgattggccaacattccctgccttgtcctttgtacggaactgatatgtccattctccggaatccccgataactaaaggatcattgtacttgtgccatgtttcaccgtctctcgtatattcagtgtaatccgcaccactgccaatatcgacaccatgcttagctatcagcttcacatctttgtttgtccatgcgttttcagataaggtaacctccggcttctcaggagcgaccatatcaaagttgattctcccggtataggttattgtgtccgtgcctttattcccatcatttccgttaattttaacattcgtatatgttccttccgggacttcattaaccgcccaatcaagtttccaagttccagctcctgtaacactggtcgatttagtaataccatttaatgttgctgaaatggaaatttcgtctccttctgagtcaaatgcgctacccttcaagctgattttctcagatgctgtaccgatattttgatcagaattatctactgaaagtaccggtggcatgtttgtggttgattttttaatataccagaaaccatctgtgtgtaacccatcatccggataagttttgtctacatctaaaatattgctctgcactaacgtatccttaatcttatttgttgagttagctacagcttcatgtctagtaacttgagtttgttccagattagtaacttcatactctgtcatacttcggaggtaaccgatcgaatataatctagtacctgcccaagttggatatgttggagccgtttgatactctcctacaccagagaattcaccagtagtgctattaaacgtatagttacgataacctgaaatattatctatatcacttttataggtagtacctttagattctctataactagtcacctgatttttggtggtgtacttatcccaatagtacaaggaatctgtatttacgattaggtttcctgtatatgttgctgttgaaattccacccttaccgtcatcgactgtaattactggcctactgaaagtaccactactactaaactcggatgtacgccagacaagagtccaagccttatcatccttagtttgacttaaaactacttgtttctctaccccacctatactcgctgaaatggacaaggtatcgttatctgcatctgtagatgtgccggaaataacaaaggtgtcactcccggtctttaaatttatagatttgttacccgattgagtcacattgatgactggatttgtattaggcaccaatcctacccttgtgtaccagaatccatctgtgtgaactccatctactggataagtgttttgagctgctttaatgttagtttgtactaatgaaccttttatatcttgtccaccattcgctgcccaatgtagatcttgttgatagtacaaacgatcagaaaccctggtatatctaattacatttctattatcattaaaatgtgggatataacctacaggttgttgtgcagttagtgtgtaaaaataagtacctgtaactttagaagaatgcattccaggatcagtagtgtatcctgtgaaaaatccaggtaaattagggtgttgatcagatgtccatctagcccacgagataagtggtgttttatctactctaaatttgctccagtaataataagtttgttgcttaatagttatattaccttgatattttacctctacaatgtctataccgtcttcagcagatataatggggctatatgtacctaatggaagctcgcttatatcccacgataacacccattgactttttgaagttgtattatggacttctacagatttaccaataccacctataaaccctgttattaatacattgtcgctatcgggatcttgtacagttccagagatactaaaggattcctgatcatttaggtaggtcatatcccctttagtagtaatttctacaacaggtactttattatttatggtaccctcatacttataatagaacccatcaggatcaacagcattatttgggtaggtattggctacagagctgtacacgctccctactaaggtatcaggtataggtgcggcataagcttcaagaactcctgattcagccataccttcactatatgctctagtatattttattttacctctatttccaggagcatcatcataagtataaaccacacctgtattagcttgaccgtaattaccatctaggttaaaagttccagtattcttatcaaaagtaaaagagctgtaacccgtaatccaatccgatttaaatatattacctcttatgtcccaataggcatacccttgctttaccgtgtacatagaccacttgtgcgcaacagaagcttggctattacttgggtagattgtcattccagacaaggtaatgactatcgttagcatcaaaataagtgctttcctcaatctattcatcttaaaatacctgccttctttcgtttttttattacttgtaaaaaaatccgtattcttcaagatagaatctctaatagacaatgcttcctgttcattcgattttgattctaaatatgacggagccatttaacaggcataattgtaatgatttccaaaagttaaagtttattctttactattcgtgaaacaataacaaccaggcgtagggatctcttctagtcgccacccatccaaattctcaaaccggaaaattgtttattcccttaatatgtgaatctctcaaaaaagtaaatttagaaccttctcccatatcgttagcgtacatatttaactcctttccacccatagcgtggctttcgtagccactttacatatgagtattttgttttggaaaccctcctgtgtcggccgcaccgaggaggagctgccaaataaaaacaaaaaaagcacgcaattatccctatgttaattaggataatcgcgtgcttcgcaatttgtagttattcagttattgtaactttaacattaattatattatctatcaacatactatcacctacctatctatgcatgataagtaagatatatttttgttaggttgctgtcatttaattagatctccattacttgatcatcgttatctgttttctagtagatatatgggcagtgtaaacatttgaaatgttcgctgagaaacccagtcccctgccacaacgaatatgtaattcatattggcatagatccagtctttaatctccctatataattttgcttcagcaaattttagaatgaatgtgtatttgttttgttctatcggtgcaatcaaatggacattgagtttgtgagagatcttcaacttggctgataattttgaatataacttggatcttgaggagctcttaacacccgtggaccattcatttgaaaagagaatgtatttatgcctgatgcgccatagtattaacaccatcgaacagttgatggatatcagttacatggaattatgcaagataaggttatttgggacggcttcacagaatagattataccaactattaaatgagagattctgggtcggaaattaatatgctatcgaatctctatttagtatggctgctccatcaattgctagctgcttagcaagtttaatcaaagttaagtttcgctctctttgtaagtgacgtttctccaacagacgaccttccggaaactcagtcaatctatcgagtaggtatagataaatcatcctcatcctggttttgcacggcaagaacagatcctcaataaacatctcaacctctgagttaacttgaggtagagataacgttcaaactaccatagtaatttttaaaatactgttttctttcttgatttttcccatctcgtttcataggtttatacttccaaacaagtgaagtagtcgccgtgttaccgaatgtttctgttttatgtaattctgtgataggtcgtgacttattataagggaatgttactatataataattatctttaactttttgattccatgcaattatcagaaaataaagctgttctccttcagcattacctattagaaaaagaccaagaactgacttattatctgcccattgatggaatgatgttactgtgtcttcaccattaagctcaatgacttcacatgtgtaatttacaagctgatgcgtactagtagtcaacatcgaaatcaatttttctgccgtttgtcttttcataagtcacccccaattggtcaaaaaaatcataagcagtactgctagtggctacggatttcctcctaacgttagactatctataaataattcataggcaaactggaagttgtatcggtaggtaagcacgcaaaaactgcattacattttttttagaactaatttcctttcataagaagtttctttaattgggagatgcgtccttgactaatgcccaacttttctgctatttgctgttgagccaagtcaggctgttgttcaatgatttcttttaactgattgagttttatggcagtttttggccttaaatttgggtaatcattgctggctctctcattgaaatcgttagaggtatcttgtttagaatcaggaacgataccctccggggatgcaggaatttttactatttgaggaacgtactcttggggaatgttatcttgaagttttaagtctagtgcacaggtccggcatatgaattgttctttaaaatacatatctgtatccagatctccgcagaacacacataatgtcgatttatactttcttaaaatcaactcttttccctcagtgaaaaactcaagcggatcgccgatatgaattcccatcgtatcccgtaattcctttggaaggacaatacgtccaagtcggtccaaagatctcttcattccggtccgtttcatcgaaattcctcccacgaaaatattaactgcatgtcttatttttattgtaagagtgaacatgattttttacaacaagtttacgtttatgagtgttattagtgctagaccaaaaggaaatataatatgattaccactagcagacgtctacgtggtaatcggaatccgttcttctcctcatgacagaagaataatgcctaaaaagataaaaaagccgcataaagagcgacttataatgcaactacaatttaaactacgactgaaaacatgagttaagttaggcactaatcaaatagaatatcgttgccattcaatttttccacctatgaagtgagggggtgttgactactggacagttaaaagcataatcttcttgtcaaacccaccgcgttcatcatgtttttgtttacgaatattctctagttcctcaaccgttgtaccttggctaagggaaaaactatagactacctctaacaagtcagccagctcaagtatctgctcgttattgtcttttgcttcaagaaactcgtttaattcttcttgcatcttcaacttaagtgcggtttcatattcctcttcactaaggactttcacatcatataatttgccgcttgtttcaataatttgcggtatcttatcacgcacaagtttgttatacgtcttcatctcaaaaccctcctatctttttcaacccagacatgcaatccagaatttccgtacgatgttgctctcgatagccaattctagctcagagacatgcttattcagcttactattctccttcaaacgatgaagaagcacttgatttcttgcttctagctgaataatcttttcctcatgcggtatcacatttgacttactactgttacaagatcgatgtgcaaataccaaattccaaagatcatcggagtagaggtatgaccatgggataacatgatcaatagcaggtgtctcagctacaattttttctccacataaaaaacagtgaaattcagggttctcagcttcaatgaattctgcaaacttaccaagcggttttcgacgtacctgatcttcgtcgattattcgtactttctttgaaagtcgtggagagtgattgaagttctctaacatctgcgtccatcgataattaatggcatcaaatacaattaggcgactacctttaagcgcaagtacatcctctccttgcataaataaactatccgccttctgtacatattgatatacgccttccacttccttaccttcaacacgtaggaagcggtaacttacatccgatttcagagctcttacggtagaagaaacagccttctcatactctgaactgcataccgcctcaatattcgacttaaaccattttactggcttaatcgagcttgtacgagcctgataagtggctatcagttccttcgcaatgctcaacatgacaggcggcttcacaggattcgaactttgctgaagatcaaagaatagggtttgttcaaaataatagcgaagaacctttttggcaatatcccttaactgaatttcaaccagaaatgcttcttctatttgaattgaattttcttgctctacggcaatttctgtaattgctttagcccaagccattttgtaggtgttatcaaaagaacaattacggattatgtgtagccatttttctaagaagtccactattttaccccgatctatcatattgttatttcacaatgctgatacaacatccatctatgaactatgagagattttactttcattaccaatactcgcaatcgaagtttgtccaatgagaattcggcaagtccactgcactgcaactaacaacattcctattcgatattaaagtgtatatttactcacattactagtcagtggatccacaatgtaaacaaccctgttaccggcataattaaattgtttatccgaagtgtctattttatatgaggttatggtttttagcgttcttcgatctaaaattagtagtccatcttgtttttcaacgagaagagttttgtcatctgctgattcacgtatccaaaatgaacctgtagttgaaactttcgatttggttacaaaacccttagaattaaaagcataaatggagctaatactttgtaacataaatgagttagatgaattttttgtgtttccaattaaaaaatcagcagactctgatattgttttcgtccagagcgtttttccttgtggatttttagcaatgactgccgttgacccagcttgatcaaattttgtaaatatcatcgttttatctttcaagattccccgaaaagacaaaccattgtttcgataactaaattcttttctcaattgatcatcgtaaaaagagagtgtacttttatactctccagcaaaggaccaattagaaatggttgagatatatccattttgttgataatacataaattcattaatcattttcttactaagcaattttccatttacactataacggtatgtcatatatttagaagaattaagttttaaataaacgagcaatgtaccatcgtccataatataagacccaacttcattcgtagttttttctgtgaacgtgtaatccaaaagcttattcccttttggtgaataaatccgaagttgagggaattctctattttttttcttatccttgtacgatgtgataaatgacatatttccgttggataatatttgattcttatattcaaatccaccactatattgcacccatgatgaagaaatgacatcaacagatcctattttagtctttgttttttcttgatagacggtgacctttcctgaggaatccatcaaataaagataatcttttatttttccaaagttactaacttcatcgtgtgtaacaacccagtctggcttaggtagggagtcataggatgttggtgctgcatacataggagtagccgtcattaagagtagaaaaataaaaccggtcagtgttaatagtgtttttctcataaagtagctccttaaaattattgatttaaataatgaattcgatcttgtaacttcattgtgaaacgttattttattatctgcagttctctccagtcattcgacgttagatagttagtgtcaaccaggagcttcagggatatcccggttaataactcccgtaacggataatacactctattcttccatacaatttgcttactgcgatttagagtaaaagaactctcctggtaagtcacagtgatcttgccattgctgttatctatgttaccccccagcagttttacaagttcatctactggagaatatattgtcaggtccgtcgttcgaaacgatccttgtcccccatattgcatgtacttgcctttgaatttaactggtatagggtcattaatagttaaataattatccatgccaaacgtatagaaataggaatctgcgtgtgagtaatcaacgacattgccgtatcttcgaggtgtcatcagatcagagcctacaattcgatacgctccaaaatttagcaagccagattgaataatatgatcggtgccacccatccaactcatgccatagtcgattgcagaagatgaacctgtcgaattaatcggtattgtttgaattaacttcccattagaggtatcaaatatacggtactcctctttacctttgactcttctaccgttctctgtgtagttgacccacagcacaacatatttcccatgagggctaaattgagcgataccaaatgcataatttgctctgctcgtatcagactctaacaaagtatgtgacttaccatgaataataagctcatgcttgtatgacctttttttcttcgtttgcttatatacaacagaagaacttaatgttcttttgtacacaaagtcatctgagttgtttttttgataagatttaagtttcagtttacttccatcaggcctgatctcgtaggggaattcaccaggatatgtaacataggtatagttttttgaatcgaaatataatcctgcctcgacatataatgcgcctactttaggtgctggatcaaaataattacgatacaatacattcgtcacaaatatatcgttatgctcggtaggtcgttctttggctgtatgtataagcttattggtcgatatagagtacaccaggtattcgcgacttcctttctctactacatacatgtttgcatctggataaacgccgtctatccttccattcgctgtatttcggttagcaataatggaaaataccttagtgcggctatcatacttcacaattttttcggtggaaccactctgtaggatcgaatagcttatcaatggattttttgtattcatgcctttaatctttctgaagttgtactccgaagacttatctacataatctaccactgtgtcttcactggtaaataaacctgtatgatagtctactgtagttttccgaataatggcgtctcctgttctattacgaaagttcgaatcttgcatccattcaaaatagatcttatctctactatcggttggaatctcattagccatagctaattttccaggaacagtccactctaaaacaagtaacaacacgattataaccgctatattatgtatctttttcattagtactctccgatccaaatcaatttattttaggtatatcatcattacaaactaaggattcattctcaatcttctcgagtgagataattgccataattaatggttggatgcgttcgtcttggaatggagtatcaacgataaactctcagcttaaataaactacctaacaattctttgtcaaaataatagatctaccttctgctataggttaaaagaaagctaaatattgagtaagcacaaagaaacgccaagacttacataaattttgtatcacgaacagacatgggaatgaggcgaaatggatggctatcgagcaagatggagatcaatcataagctgagagcagaacaggcgccttcaaggcaacatatgttgtttatcgtaaggacatgaatcctgtttgcaaagcagttcttatattgcattatttgattccggcacgtattacgaaacgacttacaggatgaggaaagccatcattgcaagaaagtcttgagttaactaaaacgttcaattagatcctgaagaagctcttctttcttttttctttctgaagatttctgaaatagaaacgacggcctccttttgagaggtcgtcattcaattcaatatgaaagagtaaatttactcacattacttgaagcataattcaggacgtaaactatccccttaccttcatagtataattgtccgtctcctaaatccatgttgaatttgtacagtgatttaatttttagtgattttcgatccagaattccaagttggttttgatcttgaaaaagaatggttgaaccttcatccgattcaaataactcaaaagaatttgatgatattttggttttgtttataaatccttttgagtcaaaagcgtaaatcgaagtcttacttttcattaaaaatgagttagttgaaattttcgtattaccaatataaggaccagctgactctggcagtgtttttgtccagagtgtttttccttgtgagtttttagcaataactgccgttgtctctccttgatcaaattttgtaaataacattgttttatcttttaagatacccataaaagacaaaccaatattccggtaactaaatgatttattcaagtgatcgtcataaaaggaaagcgtagacttgtattcacctgctgaggaccaattagaaagagtggtaataaagccattttgtttgtagtacataaattcgttaattgatttcttattgagtagtttaccatcggcactgaaacgatatgtcacatatttggaggtgtttagttttaaatgaacaagcagtgtaccatcattcatgatgtaagatcctacttcgtcggaggatttctctgtaaatgtataaccccatagttttttaccatttggagaatacacacggagttggaagaattctcgattctttttttcatccatgtaagcagtaataaatgacatatttccattagagaaaatttcatttttataaccaaatttcgcaaaaatcacacgggaagatgaaatgacatcaactgtcccaactttagctctggttttttctttatacacggtgaccttccctgacgaatccataaaataaagataatcctttgttcttgcaaagtgtgccacttttcttataatgtcagagctatccttatgtgcaatgctccaatctggcgtaggcagagaatcataggatgtggatgctgctgatataggattagccattagtaagagcgatataacaataagaaagcataagttaagttttttcataaggtccccttaatcgataatttgaaaaaaataaattcaataataagtcttttgaatcacattggtagatgatccacttcgccatttcttcgcgtgtcaacgtcgtgcttggtttaaacccattcggataatccgagggttttaggaaacctaaagaactgcatcatttacttcttcctcactcaagccagaaatgtttcaaactctgcacgggttaccatcatacctggcttaaatgtgccaacaaatatatcctttgaaatagccattcgctacggctgcatcgatggcaggcaggtacatctttaaataaggtaactgcagcctgatttgtgtttccggtgaatcaatacatccccaataccaatgcaccacttaataagagttgagtcggatttttcaattctttcacgctccacatgttaaaagcagactatacttccttgatataagctatgtattctttaggattgacctttttttcagattgagattaaacagatttgttaatttgaatctaaatgttacgtggggtgtttctacattgagttagttttattagggatctgctcttatgtgaatgtgttatgctgctcatttacacgtccttcccataatcttgaatgtagttttctgttccgtaatacctatcaaacttgccaataacaagaatattctaccactaaatgatcaaaggatataggtataatatcccaaaaatacttataatccattttgctcctgatcttttagttaagttgatgtttcacaagcttgaagaaaataaaaaaagcagctcgcggctgctttttgtttacccagttatttgttccattttattatttgatatcttatcagcgagtctcataaaaacattcatgtcaacagcgttaattatttcactttgtaagtttgcatattcacttttcaacttctcattcttattattcgctttttcgagacgacctgctaattctagagtcatctttcttagcaacgaaatatgtgaattcagattatccataatttcattaaaggtaactacaaactcttggtctagttgaatggggtcttgaagtgaataaaccgtattatcttcttctatgggactcagttcatgagcaatcgtacttgaattagttatagttacaatactcccatcacttttgttttgatttcggatttgtttagcttttcgaatagcgtcctcatactttttacgtaaggatccattccagcggaaaccacacgctgcttttgatctttttaatttttcactagcttcttcaaatgcttttaattgtgtacttccagattcgatatgttgtaatacagtctgtgctaaaaacaaatctgcttcaacgtcccaactgtctttacgcaattccataatgaacactccccgaatttgatatattgatatttctatttatatcccaaaatatatgaacatattcccaaggatctgaattttatctctttacatttctaaaagatatctacgaacattaattgattactctactccacagaataaaatatttaaatacctatgtagtactagcaactctggacataagattcaatgtttttatcatagtaattagcttaaatacttattcatctggtaaagccaacgacttaccttctgcagcattcagtcacaatacaagcgtacaaaatagttagctcagcatcgacgaagagatcaataactgagttaatcagtaagtatgactattcaaattacaatttcgtcgacagagatgatgctcactgtatcccttagaaaaattccagggtggaagctccttaattttactttctatttggatctagagcttttgactatcacggaaccggtgaagatcttcgaagtattctcttttttcgtaggttcctcaagaaaaacatcaaacagcagaggatcccccctgctgtttgatttctctagtatgtaaaattaaattgaacaactaattcccctgttggttttgagaaaacataccaaatttagtgatcatataaaatgagtttgagttaatatctacatatttgattctatgatctcagatagctgttctaaactaggattaacgtatttatctccctctacaacaaatgttggtacactcgcaacgccattaatggaggtaattttaaaatcttcttttacttcatataacccctctagtttctttaagctctcttcaaccaatttagaattaccacgcggtacataatcatcgattaatttaagtaggaacttttcattcgcccaaacggttctttcttctccttggttcttataaattgcatggtgatactcccaaaacgcctcttgattttgtctccaaagaatttctcctaccattgctgcctttatgctgtctgggcctaagaaaggataattaactatatagagttgggctttgcctgtatcaataaacttatctttgaatttatcgaaattgtcattattccaggccatacaatagggacatttgtagtcgacaaattcaatgaccttaaccggcgcttgtggatcacctatataagcttgtttatcaagtttgtactctcctgccatgacttctatcttaccgtctacatcctgaaaagtggggaattcctcttttgatttaaaacctgataaaagaaccattaaaagaactactagtaatcccattaaggtaaataccattatccctttctttagtgagttcctttttttctcaattttcattgataacactccctcttagtttgtaccgaaaaaacaaaaaaagcacctcaataagaccatgtggtcctattgaggtgcttcctcttcccgggtattcaattactttagattatacatcagcttgtacataaaaccaagtgaatattgaatgaattggtgtctaatcaaacttttaagaatctaaatgaactcaagagagatcttaagggatgctctctattagtttaatacccacaatatcattgtttaggtcacgtactacaaggcttttataggttgcttcaaagtttataagagtttctttatcgagaatatcactagtagttcttttgaaatttgaatccattaggacttgttttcctccaaaaacataattttttccgtctttcacaacaactataggtaccacctctgtataacggtccaatactctattcacttgtttacctgataatattgtttcatcgtaagcaatgaaggaattctcggttaaatcatgcaaagtaggtaagacacttgttgactgattacatccattagcaataaataaaaccacgaataatgaaatgctgcggatgattttcctcacgatccatttcactccttataaatagaaaaagtacctcatgcaacagcctaagcagttgtaggaggtacttcctcatgtcgttattcggttacttttgttatatcctttgagcatctggcgtttaaacaaacaataaggctcttatgaaagtacaagtgagtttagatgcagcacgcagaatgctcgttttgtaaaatacttcaaataaataatcattaacatctaaactgttctttgatcagtgcctgtaagacattcacgcactctgtagtttctttatttcaatatgatcggcttgtaatcttaaaaaggatggggtatcaacttcttccccccagttataattatttggcaaaaagatcttctcactatgtatttctatataataatcctccagttgatgaacgttaatacgctcattaagaagagcagttgaaatcctaacatcaatgaatcttgcaacttctaaccccaattccttacataatttgatccaagatttattaacatgcgattttattttagcctcagccggtttggagttttttttaaattgctcgatccactcgggcctatacttttttaggtgttccctttctagtgttaaaacttctacattcatatatagtccaaattcctccttaacatcccaacctaaaaaactactaatttcatcgttatatttaaaccacttttcatgatatgtaaactgatgatggataacactccactgttccgttcctttgtttactttaagataatgagccattctcttctccccctacaaataaatttaataatttcgatagatgctttactttgccaaccttaactgtaaagcgttcgatatagctattttccactttgtcgaaccttgtcccaggtatttaattatggtttctgcacaaggataaccttgattgttttgcgcgaaagttgtgtaatcacttcttgagagaaaactaccatattgttcagaggctttccgaacagcctcaatacatttaccatgaaaatatgactgtactggatttttaataggtagtgtgactagatttgaattcgaataagaatgtccaatattacctacaatcgattctggtggatagggaattgatatttcaatgtctttaacaactaatttaagaattgtatttttcagattcagctttccatcaatataatttgtcacaaccgtagtacgatcataaccaaggagttcattaattatctgggcaattttatgtatcgcgtcccttttattcatctttccgtttgtttgattatctaacaaagataatgatttccctgtttcaagcagattgattactacatccaacgtattcatgactaaccccctgtactaatttaaaacgcaaaaagaggaagcaatctcacacttagtaatgactaagtgcgaggtgcttcctcgcttctcttatttaattagttccattatattccctgagatacaatctgtctatagaattcccataaaggcattacccaatcttttttaagaggggtctcagactttgtttctatgttcctactaggagttcagtgatattctatgtaataactaatcatactgcattgtcgctattcagtttgattgcaaccgaatactctctttgttataaactggttttctgactttttttcatttgagaaactctagatcgagaaatgcctaatatttcaacaatttgatattgcttaatctcaggatctagttcaattaactttttcattttaatcagattagaggttctgcttgtcttatcaagtagttcttcagttttttctctaacgctgtagagttagctttcaccatctttaggcattgataacacacaatttttcctttaaaatcaataagcttcgagcctgtgttcttacaacaaagtatacaatttgattgaggaattataagaatcaacttatccacttctgttttaatgatgagttcactaccgcaataaatatgtctcctatctcgaagttctttagggatagataatctaccttctacttcaatttttcgaacaaaactcatcgctcacgtcctttcaacctttctttagatattacattatatcacaataatttcctataacaatcaagaaacatgcaccccatcactacattttatctcattgattttgatggggtgctggattattcataaatattcttaattcaacatgcttacgtcattagaaattagcatcataaatcattaatgcagttaatattagaccgactattcatgctaaagtctacgctgcaattgaactctcatacaatattttattataatgtctcgatgtgattcccgtatatctgtaaattctaatgcaatttgaagaccactttcaattaaattctgatacacgaatctccctctaaagggaatttcatgagtggaatctcttgtttcgataaataataatccgttgagcccttccgaattgtattcaaacaaatgtccatcttttataaatgaaagcccacctccacttatatccttcgtgatataacttttcatcggatgatcacttattccaacatcaagtttaaaactcacggttgcaggtacccgaaaaaattctctcttttgtaccgttaatatggaaacgtcctctggaatggaaagctgtagctctactggttcacctctagattgggaaagaacacaagtcttgaattgaaatttttctcctgatcctcctgcaaaatatatgtaaacctccttctttacgagtttaggtatcgatatccgatgtttaaccacaatggagccaattcgaaatgtctctgaatcaatagctttgatttgtgcaaccaacatattaccttgtttgtcttcaagctccacgtattgatcaacaaataacgcatcaagagcaatcattattgtttgtcatccctcctaagtagtttaaaacgcaaaaaaagcacggcagtcctttaggacatgcgcgtgcttcgcgttagatgtattcatttctgattcattttatcataatcggaagagacggtaaacctcttagagagaacagatctcttttgattttataggtatcgaaatagtaaatgtgtttccattggctcttgaatcaacagttatgcggccatgatatcgtttaatgatcctctgaactatatataaacccaatccagaatgatgtcctttatcttttttggtactaaatcctttttcgaagagtttatcaattaaattttcaggaattggaggaccactactgaatactttgaataacaatcgatcatcttctaagtaaccagtcagctctacttttctttcttgctcaggtagtgcttttacagtgtcaaaggcgttatcaatcaggttacttattatttttacaagatcagtactctttaaaaattcgagttgcatgctgctaatctcataactaaatgcaattttatggtttgaagcatatgttaatttagcttgtatcaaacctgctagtgctggagaattaatattgatgatatcattaataattgttacttctccaatcatctcatctgtaaactttctaagttcctcatattgctcagtagctattagtgattgaatagtggacatatgattattaaagtcatgtcgttgttccttaaccgtagtgaagagaagatccatgttactaaaaaatgctgcctcttcagattgtagccccataattatgttacttgtgtaatttctcgatataattcctagtacaatcaatacgagtagagtagaaattccaatcagcaactgcattttaagaagaaatgagaccatgtaattattaattttgctaatgtccgatactatactaatgatcaccggatacccaagatggaaatagaagtaagcttttagaatgggtttacggtctatttcagtttcaaaggtgaattcttttttgccctcatatgcccttctcacgtaatcataatcttcttcaatgtcatactggtaagttccgaaaagaattccttgttcatattttcccgtatcaccaattttctgatatttgctctgttgtttaagaaagatggatggatcaaacaccgttacctcttgtaatgaagttgacattacattctgtttaattaaatcttctaatgaccttccccccttatgtgataattgaatgcagatgctaatgtttaatgcttcagcttgcatcttttcaacttgctcgtaaataagcgcttctcgagtagagttatagtatttttgatttaaatgacctaaaatagtaagtagtaaaatagcaattataagaatgattttcacttgtttcgttttgaacagaaaagccttcatgttgttcctccagcttgattaagtatacttctctatccttatcgacactatcctccattatttattcaaggatactgaatgatatgtactaaagtgatattttaaatttaaataacacttctaaagtaggcctactagttgctttctatactgattaaaaagcaacagcgtaatccctatctatctaatacgtaaagacactacctagacgcttcttaattgaccaattaatttattgctcatctgtttttcttgtaatcgaacaatttaattattacatgactaaaactctccactatacatgtactagactccttagtattttttataatagacgcttttctctcagacctactatcaaagtatcaaattcaatttgtatagatttaaaagcaaattcgaataaaaaaagcacgcaccgcccttaaaggacgatgagtgcttcgcatttgtacgttttaaattaatttgaaagcaagaaaatgttaaattaaggtttaatcaatatgtaattcctgataactaagttattttggtttattcggtccaattacgtatacctttttgttcttttgtcgaccaaaaagtatcgcactgtcgagatcttcaataaatacgtcaatgatattaccttttaccgcactacctgtatcctccgcttttcgatagcctacaccttcaatgtacacccaccaacccattggtattacacttggatcaactgcaattgttcgaccttcttccactgtagctcctgaagctgtaataccatactgtggatgccctcgatccttaccagtagactcaacacctgctgtaaatgcagttaattcaacctcttccaaaataaatttatattctaccggtctttcctcaatagtggtgatttttttcttgttttctacgagaactattgaaccctcttgtggttgattgatattatcatcttctgtagcagctatattttcaattacatcagtatagttatactctactttaggttcaggaacccttgtccctacagctataacctctggcgtgtagggatggatcactcttcgtgaacgttcgtgttctaacgatacttgaccattttctaacactgtagatcgactaactatctctttccctggtatcccttgttgtattactttttcctcaccaataaacagatcaggatcattatattttactattgtgtacgggatctcttcttcatattctttttcagatttcgcaagccgcgtaactctaatttgtgtattagaggtcaactttaccgtcgcagcaggctctacaatgtcttgattacccaatttaatatttagctgtgtcaatacttctccaactgtttcagcatgcgtatccactgtagtattgtggttgtcagacattacgacaacacgatatttgggtagctgcaagctcccaatattctgttgcttttctgtctggagaatatacaccaaagatgagccagataagataggaactgaaattgccaacgctattagccatttttttgttctacggtaatacataaagtcactccttcaataaaataaaaaaagcaccaaaccgctttttagagcagtctggtgcttccagattcaagatatttgattaatcttagtataaagtacaaccatcagtcagacaagcctaaatactctttgagcatctgagtttaatatgataaaattgaatgaaataaatacgttgaaatgtggaagcaccactataacctctaaggtttatagtggtgctttttttgtctttagaaagggaggataaaacaatggattaattcggacaacgacggtccatctaattctaagaattcaaaataaggagtgttgttcattatggatgccaactggccaatagctataattttatgtttattaattgtattaagcttgatttctctggtaattttaaaaaaagtagaacttcggatgtactttatagacactgcccttatcacagtatgtttggccttctgtgccgtagcatactttacagcatttgaggcattttttattgggataatagtctatgtatttagattgacaaatagtgataatattattaaatttgtttttctgttttcaggattaatcattggctattttacggggaatgacttttatacaaacacttctatcttgatattagcaatctttattatcatacgcttggtggagtctatcgttgaaataagtctctatactccaaattctgagccaattacagagctagacatgcagtctaagaagtcagatgactagaaaaaaagaattatagagaggcgttatcatgcctctcactttgaactcacatgaaactatattttattaatgatatttcaactcatatcaattcgatttagatgcgttcagttcatatccttcattgctgttgagttgttaatcatctaaggatgaggggtctcttgcaaataaacacttgattggccgatagaatctaaaggaacattcatggttgccatagccagtttcttttgttcatcgttaacgtgagtataaatcattgtagtctctattgatgaatggcccataagttcctttacgactcgtatatcaattccatttttgagaagcatcgtagcaaatgagtgtcttagcttgtgacaagatagtttcatatcacttacatttggattactctttttgaatgcttcaaatgtttgattaactagcttttgaatctgtctgatcgagagtcttctccctttttgagatacaaagaatgcatcttccctaaggctataaggcgaaatcctctctttttcaacttctagtaggtagtctagtaaaacgtctggaacgggtatttcattccattttctacccttaccaaacacttctattactcctttagtctttttcaggtcttttaaattcaaccggtgaacttcccctacccgtaatccacagtaagccataagtaagaatatagctatgtttctgtttcggtaacgcccttcgataaatttaaggctctctgtgagatcctcttcctcaagatacacgggcttcttatttttttccgttttggactttttcacttctgcagccggattcttagaagcaagttcaaaatccattaatgccgtataaaatgtcctgatagcggaaagagttctgttccgtgttatatcggctgctgcttgtttatcattcagaaactccataatatgcaatttccctacctcctggggcggggaaccgtttaatgagtctagaaaggtaaaacactctctcatatattctttctgtgttgaggcggtgtatccggattgcttcaggtatattcgaaaagctcgaatctgctcactatacaaatcctcgagctcataaggttttctcattaactttccctcctaacaataaactcttaatcaaattcaaaatacatctatagaagtaagtaaattataaataatataaaaaatatctatttatgttgataactttcattaatataaaacttatgaagattgaaattcacatacaacttcccattatcagtagtaaaattgcctttaaacttaaagggcgcaaaatatggatttggtgtactttattatagcacgtacggtcctcttgaagatcatttcttttctcttttagctcattttgtgaggtgttctctaacgatatgtagctgcattaagtcaaaagagcttaaaatttggaggtaaagacacctactttagaaatatacaagtgtattacctttatcaagtttacataatatttactacggtaaaccaatgtagactctcacctttacattacactaataattttgtttaaactgattgttagcaatcctttattaaataaactgaatacttatatgttaaagttatttaatagatcatgaaatatatgagtattcatattacttaataatttaattaatatattaatactaaataacttgaatactttttagttttttgggaagatatataataaaaagaggtagggaatgtgaggtattgagaaatcaaataatttatctaaaaactttcactggaggatattcgtcaacattatcatcaagtgtgatgaccccttctctaccattaaaaaagcagccgatcaatttaatgtcgactgctttttttggttctattaaattatcgtttcgggaagagtaccgaagttcttctacaactttgctcttgaaatgacggtcaaaactaactttcttacatgacctaaacagacacacgaatatcgacttcaatgggaccatgtttttgtccctcgacatgtatgtatgacgtggttggtaactttgtgtcaatgtacaattattgagtccatgcgtattaaaccgtatacctccacgtccgctgaaagatatatccgagttgtcccccgacattttccagactggtaggcaactttatgtcaattctccagatatactgatgagacaaaaaaatgaccataacatgttgtcatagtcattaattcttatctcgtatggaatgtattagttttcaggttttgttgtgaaaattagactattctgctgtcttagtgttgtctcgcaaaccaacatattacttgggttgccactacttttaggcagctagaaaattcttcaagttgttcaaatgggcactcttttccctttggcttatagtttgttttagcatgagctatcatatttcgagtatctgaaatggaaccagccaattcatccaagcattgattttatttattgtatagagacaaagcagatccatcatccatatagtacataccaattaacccttctcgatctacgttcttattttcttttatccataacttcacgccattagtagcactatacttagcaaagaactgttcagtgttatacaccggtagcgttaagtaaccgtatttttcaggtagtgaagaaggagcaatcctttgtccactcaaagcagtagttagtccagtcctgatatgatcagaactaaaatttttcgctttagggtagactgtaatctcatggaataccggaatgacattagtgttttctttgtagaaatctttattttcttccgatacaaagaacggtgcataaacgctctttttgttagtccaattagtagtattaatatagatggttcgatgtaaggatactttacccgcaccatttgataatgtttttgttttcccagaaatcactgcatatgttttatcatttgctgttgaaaaaggtgtcacttgactcaaattagattttgttgtcccaacggccctaatctcattcagatcagaaaatgaagaagcctttttaccttccatatttgcgattctcagcaatattacagaagcttctgcgcgagtggttgtttgggtcaccccgaatgagttatctggatatccagtcatcactcctgttccgataaccactgagatgtacggagctttagcttctgaaattcctggagagaatgattccttaactggtacaagcgttgttttagtatcttccaatgcttttttgaagtcagtgtcggcggctgctaaaccggaactaatccacttagccatttcttcgcgggtaataggagtatttggtttaaaaccatttggatagtctgcaggatttatgaatcccagagaaactgcacgatcaacttcctttttgctccaatgattggataaatcgttaaatacattggatatatcgacgttcggatctgctttagacacacgtgcaagcaacgaagcaaattcagaacgtgtaactgaagcagatggtttgaatgtcccattgctatatcctttgaagtatcctttggttactgctgaatcaatggatgttttagcccagtgattgcttggaacgtctttaaacgatacagctgcttgtatggacgatccccccattattgttgttacagcggtaagtccagcaataagagtaactaagatttttttcatgaattttgttctcccctcatcttccctttttttttacgaatcttgctaaccgagttgtcagtatcgagctgattgtctttttcattcaatctttgtcccttacttgaagggattaacgatcgctacggcataattgtcgagatcgccatctctaagaagaatataatcagcttgagtaattttaaaattcatccagtctgtgtagttttgaatgtagtttccattctgaaatttatctgactgactcaaaactggatagtaattcagccctgttttgtcaccattgttaataaaagctacgtcgatgactccacgcgattttgcatgattatttttgatcaaaaaggcaatagggtttcctctatgattactacgaatctgaacttcatcatctcccgtaattgcacttttgatgacatccatactatataccacctggctatttcctaattggataggaaggtcactttctttgatgatctttatgcctgaatacttctcatcattaatgttcttgaacataacatcactttttgtatacgccttgaaatcgctcagtttcgtcatcttaaactgcttatcatccgtactccggaagtctttattcccgatccagacccaacggccaattttgtcccactctaccttttggccaagtccttcactgactagacgcagcggaacgaatgtccggttctgcttcagaataatctgcgtaccgtagtcctttttctgaccattcaccaatgcagtcgtctgcccaattgtcatgtccactgtatggtctttgctgaagatcccaaccttggatactttgccaaccttcgagtatgtaacctttgcacccagcgctgcagatacaaagcggatcggaaccatgacactaccttggccatcctggaatggcttcgcatctggaaacttcatttttacggtattcagcaatacctctacttgcttcggagtgcttgcagctgcaactgcttcgtttcccgaacctatcatgcttacagtcaatatacttgctaatactgttaataaaagtttcttcatgttctaaacccctctgctttccatatgtacttcttctcactaacacttcccagtatctttttttataggtctaacaaatcctaaatatcaaacaaacttggcaatagtaagaatattttaccatgtactatagattataaataggtattttatcccattgttatattattataaaacctgactttctatatgaactaattaaatgtatatctaattgaagcacaagattcatccgtatcccaagtaactcttcgcaacgtaaatgagcggtaatttattatcattgctagctgcctttttctaagactccaacatcattagcaaaaaggtgtagagtggttttttccaatccaaccccttttttgaagagactaatcactgagttcctacattttttagagaatcatggtagttcttatctagccccagctcaaaatcagctggcgggctgaaaactttagcaagtttttcggcaaaatataaaacggttctttggtgatattttcgatatcatttattaaactatcctgcccgatagtggaatagcggctgatcctaaacgagatctaccgctaacaaagctaaaaaaatcgccgatatagttctctccgtcgttcaccgcgtagttgagcatagatttgtgtagttgatgctttttcatggcctaacatgccatgaataaattctaatggtgctccattgtcgagcaactgacaggcataggtatgacgaaaacgatgaggatacacgtttgcggcaaccgccccacgagatgctaagcgctttaatgcccatctaagtgttggtatagccattcgtttcactggactgttatctgttacaaacagggctttacacgagtcctcgcgactgtctaaatattttttcaaccatactttacactccgtggtgaagtaaacttctctttgctttgccccttttccgtttactatggcagagcagctttcccagttcaagtcctcaatgtttaacttctccacctcacctatacgacaacctgtacaatacaaaaattcaagaagagctctttcccgtaaggtctgacaagagatctttaaatgtatcacttcttcttccatcaaaaacttaggtacccgcttctccatttttggctcacgcagtttaatggaaggattgctagataggtaggtttcttcatatgcaaacttaaataaggaacgtacaaagcgaatacggtgcccaaggctgcttagctttaaacgatctgattgctttactaagtattccttcaggagatttagagttacccccgaaatatctacatcccccagatccgaaaccagcatcttgagttgcgaagcataagcacgcaatgtatttgggctaaatccttgaattcgtttatccgcctcataatgattccaaagttcacttaagatcacaataaaacctcctaataagagcaattaattttagtttgcttcaaataagaggttttagactggtgctatttaactaaagtttcccgttagttcaaacctagttttctcattgatttaaactaactctgtatattgctccagctattaacatgacattttttaagcccagaagttcttcccttttccattgttcataataatattttaatatggtacttttgactgtgtaagaagaacttgtcctttgggtagtcctgatccaccataaatagttactgaataagtgcccgaaggaacaagcggcataagatcattatttacgaattccactatttcatctgctgcaatgtcttcattaaaaataactgtattcttactgttgtgctttatttcaactctaaaagagtgtcctcctgtattttttacattaagtttgatgtgtgaatatccaattgtcacagaataatcttttacagggtccaccttgtcgcccttcaaatcccaagttagtgtttgtggttctttagatgttttaggactgttttctataattttatttccttcttcagatcttaaaccaacattatctttccaagcgatagaaactccaaaaataagtgagatagacaatgcaatagtaccaataatcactagaactttgtttttcaattattaacattcctttcaatagacatgctcaaagaaacatatcccacacaataatatattgtagtccaaaactttttgtagatcatctccatcagaataaacgcaagtaagtaagatctatcatacacctctatgcttatggatgttctatcacttaataaacaaactaattagcaagtttagttaagctaacctgcctgttagttgaacaaaagcagccgatcacgatggttttttattgaactatcttttctcgttagcatgatgagtagttcacttttttaattgagtcatctttttaaggagtactgcggtgcagacagatataacactggctaaatataaaagagcatacgctatggcagcataatatgtaagttcagcttcaatatctgagcttgtaagaagcagcataatggaaaagccaacgacaaaaactacagtacctaacagaacatttttaattacttctttcacatactcacctcccaggggcccgacctctattttagcggttataatttttcctcccatagcttattctcaattgtgatctagccctttctcaaaacatatcttttgaggtaactccatattgttgtatgattcgagtagttcagaacgaatatccagtgttttaatagtgagtatatatccttttatcgtgttagcaatcatttcaatttcagataaattgtatgaagttatatccattttcgaaatgatcacttgcttaccaagcacttttgataaagaagaggtaatttgtttctttacatcgtcatttaaactttcaaactggagtaccaggttttcaaggtcatccttactacctttcatcaaactgtgggattgcacagcactatgctttggagatgaagacttgatagcataaatctcaatgatttcatccattttaaatttaaagtgtataccttcttctgtttcaacaaataggtagccctcatttagttctctagaaacaccacggaaaaattcttcttgattattaaccttcaatactatagaacgttgttctttaactgtcatctcaataaattgtctcttattcatcatatcatgcaatgtgttcccctcccttttagagataaagtatcctatatgaggtgtgttattcccttttcattaaactaacctgcccgatagctgaatgagaagaagcagttgccgcgacggcaaactgctcttatttagtcttactcacctaccataccgtccatatcagcatcgtgcatatatggatataaccaatgatcactcgttattggcatactataacctgctgctttagcttctttaatcgtcacctgtccattaccgtttgtatcaacattagaaatgtcagcgtttttatttgaactagttgagtcagaaggctcactgcctgttaatccgagtgatgcatttacatcatcagggttcacattgtcaaatgtatcaacgatcttgttaccctttaacgtatacgtgtactggtaacttgaagggatttgggtttctgtattcggatatgtgacaatcgcttcaaaattagtggctccacctgctttgcgtatcgcatcttccatataagcctgatcaccatgtcggttgagtgtgctatcttgtggggtaatattatatgcattcgatacccctccgagagaatcagcaatgatatgtccttcatctaaaacgtcactttcaacacccggaacctttgcctcatcagggtagtatctgccagacgatagtacaggttcgttacggtcgtcttgtagaataattttatcagcaatgacacgcactaattgcccatattcattagtaaatgcccaatattcacggtctccgtatccaatgtcaacaacaacgttaggttcacgatgcccagacaaatcaccaccatcgacttcgataagcttgtatcttaaagacaattcgttatttggttgtgttgatgtttcctctcctactggttcatcaacaaccgctttgacagctgcttttttttcactattcttagttgttgtatcagtggttatttcttgtgaatctgtttctacatctgtattggatgtatcttctacgttggtacaaccaaccataaagatgatcgttataattaagattaaatagttcattttctttttcattttaggactctcctataatttcatactgttcattctaaaaacgacgactttaactatcttttcttgttctataatcttaccataaaagactaatatcctattgaattaccctgcccccgttagcgcagcgaaggaagccgatcttagtcgtcggcttccttcggggcatcattaagctatagtttcccgttagttgaacgtgaatttagttatagttcatcagtaatcagtcttaaatccatttataaagggtccgttgcccataggattccaatatgtatattgtccattgcaactattcccgtatcaaacgtatgccattgtgagttatttatcgttgtccaagagtagagcttaaagtaaccagatttcgaatcaaactttgcgtttgtatagaatgaggcttctttctgaaattgatctaaaaaatattcacttaattcatttgccatcggttttgtcttcaaatcaatatcatgggtcatgtttttcgaaagaacataaattataatttttttagcataatctttatcaaccattctccagttaccctctatttcatctgcattatggcccattcgcttcaaaaatgcctccaatatacatcctttctcgatagcactctttaattctaaaccgtatgtaacttcacctgaattcctctttgataataaactattgaactcatcttcattttttatcatatatccgacacctccttctttggaacctctagtaaaaaacttctatgagaagttaaaactcctccttcaactatcctcgttagcttaacgaaaaaaggagcagctaccaactggcagattgccttacgctgttttccactaacagttaccgtttgatgaatgagaacctactttaaatcaataaaataatctacgtaatatccttcagaatcccagtaatcttcgtattctttataaatatcaataattttgtctttaggtcttccgcaacgttcaagaagccaattccttatataatggatatctttattttcatcctcccaaataaaatctagaacccctgactctcttgaaccactgtccggtacataaactgcatattctgatgaaaaataacgggctaaatcgaaagtaactttctttaaataaagttgaagctcctcctctaggagaaagcttctccatcttatataatgatgaaaataacagaccttttccgagaatgtaaaatccattccgcaaggtccactgatttccaaagtgccaccaattccttcatgaaccgtaaaaggcttatcctcatccttagggttatgagggagcaggaaattaatgaattcatcaacgtgctttaatgatctagaatttagtgcatgacataatatttcaattttatctctattcaacttatggcctaagaaagctgtgaaatctgcccccattttcttccgctcccttaaatcaatttcaaaaacctcttgaataagaaggtcgtaaagcaggtactgctcctaacaaactcattttaacacatactggaactaacctgcccgttagcctaacgaaaagaaagtcaactgattagttgtgtgcatacttgaattatcataaccgttctaatgggcctaacggaaattttatacttctaattgtgttccaaaagcataaaacaacggaaaagtatgaaatccccggcacacttatcggtaaagtcacaatcgtcatcggccaactttctcccccaaggggcattgtaaatcagtgattcacagcaaataggatgtgatgttgccatcgtccggtccttccttctaatttttgatccctaggaacaggatcgcgttcacgtcagggttccacgtggttttgcctgcgatagtaagacgggtgtacgtgcaagccgattgctttcgaatgtatagttccgggcgacagcagcgaggtattcttcactatcttgtagagctaactctttgtcctatatataaggctcgtggaacgaacaaatggaacaattttatattcagtaatatattaagtaatatcttactgaatataattaacagttaagtaaacaaagaaacttagatagtagttaggataatatgaattgaatttattagaagttaaaagcgtagacaagggtacttccttttcatggagcctccttgtttttttgtgtggggagagtattgtatcaaaaatacacattttaataattgttgcttttcgctttttctttttcagccttttttctgtatataccacgttctccttctatatccgctttcaaattaacttccatttagaacagaatgttattaaaaattagccctatgttcttgtctatcccaccactggttatgacaagtcagcaggcatattcaacttttggttttgttctaaattggatatggaatatataagtttgcgtactctacttagaaaaaaattgaaaatatcgaaacttttgttatgtttctatcgtctgtacttatattaataaggaggtgaaattatgcgctgggcacctattgtactaatcatttcttttttattagctggttcctgtaataatgtcgaatctctaagtaagaataacgttaagcaacctacagatactacacttacaatagaagccatagtattaggtaatgctgtcacacaattattaatcactgaagatttagatagtcctgaaatagcgtctaatttaaacaagatagctgagcaaccttcccaagaaatcattagatcgcaaaaatatgacctattttggctagacctaaaaaatgtcagtgaaactgatgttaatatccaagatttaaaggtaggctccaaaattcgcttcaaggtcgaaaatgaacaattggatactatacctcctacaattactgcacaagaaattcaaataattgattcaaaataacacagatatcataactctgtttagatttcacatgaatatttcaaaaaaaagtcgtcaggtcttctgtagctggtattatcccctcaaggtagacagtgaaaaaagaggtcatgttaaaatgaactcaccactgaaaaaccggaggggatttttgctatgccagcgaaaaaaggccaaacctttaatcaatataggaagaaacgaagtaagaggctgttcgtctgcgattggaagaaggttggacatacagtcggatcatggagaagtttggtattaagagtgagagccagattattacttgggtacggaaaagccaaaatggagagagttttgaggattaccctggacgttggacgaagaagcattttagcagtgcagaagaagaaaatgcttatctgaaagcgcaggtagaatatctaaaaaagctcaatccgaatttgcacggagagggaagctggatttcgaagcccggtgccagtccattcaagaaataagcaagtgggcacctgtggtttggttgtgtaaaattgctgaaatctctcgtgcagggtactacaaatggaagaagaatgtcatcctcagagagaaacgagcgcggatctaaaagcacatattctaggcattcaccggcttcgtccttatttcggctacaaacgtatgcgaaccgcgttaggaaaggaaggcctcgcggtgaatcacaaaaaggtacgctgcttaatgagagaacttcagattcgttccgtgattcgcaagaaacgtccatttgctggccggaaaccgtcagttctattccgaaatgtatttaaatcgggaaaaagtcgctgcttaatgaaatttctcttttattgtctacttgacggggctatgaccaaactgctatcttgtttctacattggtagggttagtggaaagataaattcaaattatatatgcgtaaaaatgggacccatctaattagaacgggtccctgctttcatttcttaaggttagacaacacctattgatacctaaatgctccttattagcgtatgcatttgcgtatgggtcatactattcagcattagcagcagttacagagctaagtaaggcataaagttcgacggcattcaccataccaccactattttatcttctaacaaaacttgaccaccatgaatactttaactaagtctagtttttactgttacctcactcacttgtgttggatttgactggttagaccaatgaggataatgttcaagcttggttactgttccaacagttatgtctagtaccaaatccatatttgttaactgccaagccttttataatagtgccttgtattactgttggtttgagttgtccatcgattccatcaccattgttcattgtgtagaacctactattgaggcaaaaattatttgcagtcaatcgaactaaaccacctacaacgatcgagtagttgcgctattcccactcgatcgttgtagatggtttagaagttacgtcatagacgatacggtttacgttacgacttcgttaacgatacgcactgaaattttctccagcacatcccaagggatacgtgcccagtctgctgacataccatcaatggacgttacggcacggataccttcggtttaggaatagcgagaaatttcgaatgtaattactggtcaattatccagttgttttatacatcaatgtagcaggtgaattgaatagtttcaatctttaattacatgatcacatggggcatcctgttgaaatatcagttaaacttatctccacatatgtataagccattcttatagctatttactatatgtatagttccaaggttgtttataagtgtaataatgaaggtgttccataagagatatatcagtatctctcacagtttgatttacaacctccagtaaattcacagcaatgttaattctgtaatattcagcagttcttccattgtgtgcaaatatacctctaagctcaataaacttccttatttcatcttgactatatctccaatctttagacaatggctcttcatatccaagtaacttttcaaaaagagtatttattatatgcggcttaggagtattaagtccccacttaccttgtgaatcattacctaaggcttcaagactagcacattcaaaaagtaaatctttccatccagatccagcaactctcagcaccctagaattatcgccttttacatattcaataaaaaaggttttcaccttctcaggaaggttattagggtcgtccattttctttgtaaggaaagttacagattctaataccacttcttcaatgtatgactcccacgatgcagataacatcaaaataatgctttttgtaaaatgatctattgccttcttacctttatcagaccccttaacgatattatgtgcttcaataagtctataaacacttttcagattatcatgatagtttttaaacgattttgatggcatactttctcctcactccctaatatagcctatatccccataattatatttaaattatttagtacataaatggagttcttaaaggatacaatctgttcaattctaagaatattgaaggaaccccctttttagtctctccttttccatttgttctttttgtacttgtacatagaacacaacattttttcgctctcgtaatacccacataatgcaaatttaaatcctgtataggatcatcatatttttcattatattctgctggaaaaacatatctgtggagatctacgtggaatacaatatcaaattcaagacctttcgatttatggagagtcattatttgaatttgattctcaccagctggtttaaaaaactcatgtgattcaggtttgttaaggacattattcaatgtcgttatagcagttgtattttcagcctgagggtatattattttagcaatcttaatgaatgcaggactacttttctgcatctccatattatttttattaacttcgatctcactcaataagcgcataagttctctagcttttcctgcctgtgtttcaatgtctaaataatttccgaccagctcatatttcgttaatgactcatcatatataaaattaagaatgctttcaaagacacttccccaaagactcctattcccatcaaagggagtgttaccaaaaaacttgttctccagcgttagattccgttgtatcatatcgcctgttctcccacttcttacgagtattccaatttcatttcttgatctaactccgaaatgtagcattacatcaggaatcacagcatttagccactcagcagtttctttttcccccccgttgattgatttagaaaatacacttatttcatttgaggggataaagtccgtaaacccttttgatattaatttgctcgaatagtttataatcgaaggatgacaccttctattttttgtcaaacgaaataatttaaagtcagcattctgagcaagtttcattagaaactctgatgattttttggagaatccaaatattgattgatttatatccccaaccgctactgaaatgatgcctaattcttttaacttaataaggacatcatgttggtcagaaccagtatcttgatattcatcaataaatatatatttataccttgccttcaaatattttctgcaagaaatacaattttcaattatatacagagcaagtttcgatgttgattcaagtaatacataaccttctacatataacttaattagtgatgtgatgttgttatttacccattcatcaatatccttttcaatttcaggctctatatccttgactcccataaatgccttaaaaaattcattctttacatcaataatttcaagttctttttttggagtgccaaaaatgtgtcttccaaaagaaaaaacaatttctctgatataaaatttatccattgtaccaaagaacgaacttttcttatcagcgccatttcccaaacatcttttttcaagctctctacttgccttattagtatatgagatagctataacaccttgataaaattctaattcatctaatatatttataattttgcgtgatattgtgaatgtttttccacttcccggattagcaataactacagtatgtccagaatagtcaataatctgctgttgttctggtgtcggattcattgaacatctcctccacaatttctttgcatctaattaaagggagagttaaatcattctccaataaaacttgcaattccccttgattcttatataaaaaatcatacataaatgttgctttacttttctgcattttggctagcaaactttcataatttgtttcatcatagtgtgtttcaactatttcacgtaaaggtgaatttaaaatgtcgttctctaagtcaatgttagataaatacatatctgaatcttttaatactattgcaaactcctgacctagttctgtttcaagctcgcttaatttttctcttgaattaacgtttcctagcagatgcttcttgtcagtgattaattttgctatagggtctgtatcatcatactcacaataattctcaacaatctttatacaacgggatattcctgagtaataataatactccttatgtggaacttttataatatcgttatccgttctaataacccaatcaatattcaaactatctaaaacattaacaaaaggctcaaatcctacgccatcaaccattagaattgagatattatatttatcaagatcaatccctatgtctgcggccagtgctttataaaacaatacttctgagggtccttcaacaagtaaaacaacattagaaaagaaagcttctgcgggaataatatttaatctataaccaaattcaataattgatttttctagtccagtgctacatccatcattagccgctttagtcgaagaatcaacatcgttgtaaagcctaattattgaatcaggagaaaactcacttgatatttgtggtgaatgtgatgttattaacacttggctcctgagtgattcaactaaatactttgataaccttctctgttgatgcggatgcagatgtgcttcgggctcctcaatgcaacaaatagtcacctctaatggagtgtcgtccaaaattctgttttttgcagttcttaatgcaagatagatttgattattacgtccgtctccacctacagataaactcttcccatttaccttggaaacaagacttacactatttataaaatcttcaacatctaaaccacccgtatcaaaatcaattgtactagaactatgatgaaatgacagactcagtaattcatcattcaaactacttgtagcactatttatgtatgataatttcgttaatctgttattcaggatatttatagtcttttcaatctttttagttattttatcatcagattctactatttgttcagttcgttgcttcctagattctaaaagcaaatttttcttttcttttctgatatatgaattaagttctctactgctttcaatataatccatattcaagacttttaagtaataacgagattctataggttgtaaatcgtcttctctctggccaatgtaaaattgaaagcttttttctccagaccttcccctttttacctcataagcaagaaagagctctccgcttgaattgatgaatttacccattttccctatgacacagtcctcaacaacactctcaaatttgatttgtataaaaatctcattgttactatcattatatacgtgaaaatccgaatcttttagttctaaatctgagtcagatatttttttatctagtaatagtctgagagcataaattaaatttgattttccaatatcatttgagccaattataagcgacttttgttttaaatttatatttgcttcattaaagtttctaaagcctttaattttaatatttgatatatacattttcaacattcctttcgaaacttaaattttgaattcacgcacatcaaaacaaacatcaaagattagctactaagtcctaaattagaattggtactatagtaatattctaccacaaaactctcatagtagaatcctgttttaaaataagtgaagcataattcattaccaagttcttgccggcctcccccgtgtaagcacacaaaattcatgaaaatttggtgcgggtagaatgagccttgaccgcccgctaggggtaaaacccgtctaaatcggcactaggttggtctatgaaatcgtatacaaaattgccagagctaggatcatgggtaaaatcctccattcacagttctcataatacacaattaggagaactaaatctaagcataaaaaaccgccatcgatgaaatatagaatggcgtttcgattcatcaaattaacttatctaatcttgtatttagttcctttaatgatatttcagattctttgcttgccctgtctctatgtattttctctaaaggagatttcactatcctattcagcaactcatcaagttaccttcaattctgtctaattgttcctttatttcgacccaccaaactcccccctttccacatgattgttgtcttttgagtaattttagcgtttgctggttcaatatgatactctttatcagtaatactgctgaatcaactaaccccaagattatcagtgattcatcgccatactcccctcagtatggttccatgaattataacagccacaaaataaattgttaattattgtatattgttaatatgatttttctattgtaagatccaataaaacgataactaacccttgtcgagtcatactatccctacttaaaaagcaagccccacctgtaagagtgggcttgtagtctattacagagccccccccggtatccgaacggattcgcttgcttttgaatacgcaagttatttcctttatggataccttccctaaaagctttacctatctgcttgatcctgtcagcagaagttgtccgtaagttacggaagagtaacggtgacgttagtgtctccccttgaacagtataagtttggtgagtgttattcctagtcatgtactcgtaataagacatagcttttacattgtctggtaagttgaacgttaccctttacttttcatttcatctaatattcccaactgagcctgtaaggactgacgttgcaagtccctaatctctcattggatagtctcttgcgcttcggggtcattggtcgatgctaattgtttctgtaggtctgttatattcagagcgaagatatctacctgcttctcgtgctggttaatgcgaagattacggaggtatgggttactttcgtctgccccgcccgaatctactctggcttgcaggtactcattgctcagttcatctaaggaatcaaggtcttgcttgtacagaccgatagtggatagcttcatatccctgattctgactttctcctgagcaatactagattgtagttgctgaaccatagcatcaatttgttgctgctggtcaggagtagcgtttacgctttttagttgctctatttgagtagtcaggttatttattctctcttgagagttagccgcagacgcattgatgtactctctaaagtttctatccatagagaccagtttatcctagacatcgcggcgttgtagtctgcttcttgttgctatctcttaacttcctcttgggcaatcttgagttctccaccagctttctattggttagatttccatctaattaagttatcctgtagtttctggattttctcgtcagaagctccgttccctctagcactctccaagtctttaggcaagtctttaggcaagtcctcgatagtctgagcgataaagtcaagctgttcttagtagagtccaataattttctggctcatttcgtgacggatggacataaactcaactgaatcagacgcatagcagctatctatagcttctatctgctgcagagtatactctgtagtgatttcaccgatacggtcttggatgtcccgcttaatgtagtaatagtcgtagttgcgatatgaccctttatgcaagtcttgtcttctgcgttctgcttccttgagagtaacaccctcagctagtgccgtttgctcctctaacttaatatattacataatatattattgaatatatttatctcatgattttgagatgaacgtaaaacaagaagtcacctatgaaaggtgcctccttgtttaccaattagaagcctattgattcatttaaaattttatatacgactacggctgcttgtgcacgtgtagctagatctcggctggcaagtctattatttccgatcccatctatgattttatgatcaatagcagttgcaagatcaactttagcccaagaactaaccactttagagtcattatactttcctaaaatactgtttgcctgagtggttgtcatttcagggagtgttttcaattgattaaatgcacgtaccgctatggctgccatctgttcacgagttatattttggttaggtccaaaggagtcagaggtaatacccgtgattagagctgccttccatccctcatccactacagcataataccagtcattggtatttacatcagaaaagggctcctctcccacattaactgtatccaagtgttcagaaatggctttaataagcattgaagtaaattcagcacgtgttacatatcgatcaggtctaaatgaatcatcggggtaaccagagataacttgcttttttgacataaaatcaaggagcttaaaagaccaatgattctttatatctgtaaagctttttttgaagttcatgacaataaagtcgccatcacttactcctttagatcttttcactttttcctctgttgtactagggattaacgtaaatcctgaattctcatcgaaacgataaacgttggctagtttaacatcagcgtcactgtagattggaatttctatgtccagaggattgtatacacctaaaggaccaccagtatattcaaaacggataaaaccactagcaggtatatattcatcctcatagttcactccaatattggcacgtgagatggtaatattacctccgttattccaatctctcaaaagagttaaatccgctgtagcataaccatttatagacatgagcttgacctttacttttcgatcttgaagcagtttagttaaagtactatcaatattcaaatttaatgaatcattcaaacctgtttttttagaatagtctactacgatctccgaaactttagaatttgaacggagtatcttctggatagcttgagtatccaagttgaccgagtgtaaacgacccgacccttgtctggagagcgttgtggttgcaccagcaccatcagtaacaacaacatctcccttactatctaccgtaagactagtgttccctgcatatgaggtaccagaagcagcattattattgacatcacctgtagtagaattcgatgtgcctaggcggataatatgaagattataagttttagtagttatgccgttagcagcagtaatgacaatggggaatacactagtactttcttgtcttaggtttaagtttgttgaggatccagccgtaacgtatttaccatccagattgatcgagctaaagttatcagatgggttgatgacgacatttaaattagtagcattggagctcacataatctacaaaaactgaaccgttctctgcaaaatccttaccgttaatgagtatacttctgatattagcgttgttattggcttcaggcttggttaaaacgaatgtataggatttagatgcaccatttaaggaagtcatttctacaaagattgtattgattcccgttttcatctctacaaccagacttcctgaagagctaactaagttaccattaatcttagttatagcactattgaatgctgttgtttttacactcacatacgattgagtagcctctacacgtccagtatagtaggacttttctgtactaaatggatgatcaagtgttgccccctcaaccacaatcgatttcaagccggcatcgtccagatttatcgtttttttaacagaaaacacataggttttaacgttgctcggcacatcaatggattgcacctcaatagtaattagagttatttcatgatcaagggtaatcggtaatgaaggtgtaccattggtaactacagttccattaacacgaattgtagtatttgagtccatggcataaggtgtaaccgcgatacttttttccgaagtattgacggatgttgtatatgtatagacatcaggattaaattctctattcatatctacccttggtgaaaaatcaacactaaaaagccgactttcacctatttcttcagcaaatacctgcataggtaaacagaacactaacattgccagtaccataaaaaatgagaatactttttttccccttttcaaactaattcacccttcctctttatgtatcattgaatgaaacaaacgaacgcaaaaaggggccattggattgttatccaatgaccccgggttcttccacgtaggtgtccatattattcaattaagttaattatatagaataactggaactaattcaatgatttttattgtagtatcctttacataatcagcaggtggttatttatccatcttctgaacttctcacatgtgttcagttcaacaaatgttgctcactcaaatgaagagcagcaataatatctaaaggtttttcaatatctccgattttaaatctagtatccccacttggtagtatcctctcttgcattgatttaaaggataatccaacgaccataaattctcctgggtacataccgataaaacgacttggaatacgtgtttccattaacataaattactcctccattaatcattttgaaaaaaaagaagcacctacaaattaggataatcctaatcagcggtgcttccagctgtcgtatctattcatttaataaaaattattataacagaaaacactaaaatatagaacatattactaagaacgtgactgttttacttgagtgccttgaatctatcactgatattaaccgtctaaaaagttaggatcgttttttttcttttgatgaactggaacatgttccttacagactgtattgttccagcgcactatctttagatagtctaaatcatcttgtgagagcacaacgccacatttaaggcagtatttcacttcaatattgcccgtgtctgttagactacttccttcagattgatcttccaagcttctaagtccaactcctggattttccgcccatttacgatagggtgctaaatcttgatgtcctactgcaaaataatctgccgcatctcgaaaagcgtcacttaccgctgaacgaatagattccctatagaattgaatttttttattacttttatcccgttctagaactgcaaatccttgtccttcagaacttgaattcagaatgttcaagacaccgcgcatttcaatttcatccgtttcctcatggtagatgggtttatcagtagtaattctccaagaccaatatggtccggcagctgaccttaccctatattgaatgggatgaacaggaatatacgcgctgcgtgcatttgcattcttgaattcgaccgttttaggaggaaatggtgctgctaatttaaacataatttcagcgtgaattttctctatttcttctctagataagttattcaacattgatatcaatcccaatatatagatagtagaatcatttatccaaatcatatcataattgatgcatcaaaaaaatcattactatccttacgggattggttctaatcacgtatgtctactaattagtaagcaaaaaacgaggaaataccctcgttctttgaacaacacgtatgaaaagtatggattctacattaatcggtatcatgaactcaaaagttccagcgagagtttcactaggattaagatttaactatcactctgagaagctgggcatagttagagattcataaatcttcttgagatatcccgccaggtacaattttttagattaatttcatctataagcttggaagtaatttaggaataagtaatactactcccaatgtgagtggcgaaaacattacgagtccaacacccattctctttcttcctggattttttgcagccatcaaacgaacaaaaataccgatataaaacatcgttcccgttacaggaatggcaatccatttaagcccattgaaaatgatcgagccgaatggcatggttgaatcgacaagttgctttactgattgtccagtagaggtttggttgggtgcgtcccctacgaatgtatgaacaatcgccggtacgtatgcaatgaggaaagttccgaaaccaaacgcaatcacaaaaagcaggcctcttcgttttcgaattgggtttttcccggcagtcagtaaaattataaatccaagtccaaataaacaagcaaaaacaggaatccctacaatctgagctagtcgaataacttggaagacagattgcattatattctcatgcataatgaaaatatccacctttcaaacgctcttattaatgagtattttgaataatcatctctatatcatctactttccagccatctccacgtccttcatccaaaagaactgtcttcatgacaattatttgcacacttcctatcccattgaattctgtagtaagtgaaaacttattcaagacttcagtttgttttttatcagaagaaggatcatgttgtaaataagctttcatgtcacttaccgttgaatgaacttcactatcaggaggcagttctattcctgaaggaaatgtagatctatatcccttctcagttgtataaggtcttatagctttataacgttgatttgtcgtttcaaagttaaagaatccttcgacaaatagcctattctgttgcatgattgtctgttctttcattttttcttggttgagactactggtataagccaacgagccaatacctactccgcctaatagaacaattgctaaccatactgcataaaaacttctttttgtcatggtttttaaattactcctttcggtagtattatttttcaacaaggcgacgatatccgaagaaaggtatctttctccaacggtgcatagtatcaatacttacgccatacgtacttcctgaattgataaacttgccatctccaagatacatgcctatgtgtgaaggacccgccttataggtagaccaaaacacaaaatcccctggtctggcatcttcggctcttatttcaactgttttatcatattgatttcttgtagagcccgacaaatcaactccgatttgcccaaaagcaaattctataagacctgaacaatcaataccttttccgaatggatctcttccaccatataagtatggatgcccgagatatttagtcataacgtctagtacctcttgtacatcaaatatctggccatcattcggaacttttatgaccgtacttgttgcattatagtatctcatcacgttatctacataattgggatcaccatatccctttgagccacttatctctcgcatcattaaactgaaccctaatgcattttccttagaatatccaccagcgtttagtgcatatttaacgtaacctaaaccatagttatacgcttggagtgctatttccacatctcccccagcagctttatatactgttgagaagtgatctacccctactttgattgataattcaggatcggtaatataattacgcggtttcccaattgattcggaagattgcataacatctagcaatttgcctccagactcctgcatgatcatggctagcagcaactgagtatgttcctctaaccctaccattgctagatacttccttactataggttcatatctcaagaccacagcaggaactgaagctgtgcctggcaaccaattaccactatagttcgctgatgccttacctccatataaagcaggattccaatcaggatcagcaacggatataaactcatagaataatttcatatcatctttatctaccccgaggttaattagtatttgctggaacttttcaccatcaaccacaaagtccgggacatagcgatcatcgacagtagtatgatcatattgctgataggtggtcgtagtacaatcaccactagtacttgtacccacaagatcccattgatctgttattgtcgttgtacccccaggatagtacaacttcaggggcttaatattcatatggccgtaatccaatgtaatatctgatagcacatcatgtgcttttctggtgctttctgatcgagtctcttcagttgtcgtatgtgtagatgagttaccttctccatctgtagttgtaaccgtacacgctacaatagattttgttctttccttatcatcggagactgtagtataagaaaatgagggttgaaagctcttaatcaattcttcgggtttataatcagatagttcaactttcttttcatttaccatgatttcatagcgaacaagagatgcaggtatgccccaactcggttttacagtcttcacaacttgattaagccagtttttatctgcttcaatcccccaaagttcagcaactgttttatcagctgcagatttgaactctttttcatattttacatccgccgcatgttgctcttcactacgagcattcccacctaaaaaccagtccgcaaatggaatggcagagagggcagctaaagtaagaagaatagctaagattattaccaatccccaagggcctatcaatgagacaataagcttcccaatcgataatacaagctgtttcaagaatttcatgagtagtttttttaggtacttccccgcttttcctaccgctttagaggctacttttgtaccgcctttttttaatgctccccctgcttgtccagcagcttgaccgcctatctcattcgcactcaatttctcaccccacaatcgcaagaggatatctcctacgagacatcctcaatacccaccaaatttgattaagatatatcacttgttctatttcccttgttatatgcacctgattgagcccatgcaactcgactagcaccttgcattagattcctaccggttgctcgcgtagcttgcggtacctttccaaccatatcagccactttgtcatctccacctgctttgcctggttgtttatgattgaagtaatcttcaggattaagtcttcgcatgtcaaacgtgttgtcggagtatagcttttggccaccactgtcagcaatataagcctcactgcttcttccaagatccgctgttgatccactcatcccaactaatgctctctcagttcgtggcctcacattgaccggactaacagtactcgggtgttcaatagatcgcatatatgaaccgttctcttgacgattccattggccgtcttgtttcggattacgcatctgataatctaccattcgttgttgacccgttttgagagaagcatcacctgcaccatagcccccaattttctcccattttccagttgactggtccttggcttcataccaggagcggtcattcgtttggttccatcgagcttgactcccactgaaacgtggatcttcagagagactatttaatgtcatcccacgtggactcatcgttccatcagctcgcattccacttccagaatcaaatgctctttgacggcttacacctgacaacatttgtcccatagatttaccagctgttccaaacttattgccaagcgtaccaccgattgctcctccgagtgggccggctaccgacattccaatcgcagcacctacaccacctgcaagcatcccagtagactcgccaagattacccatcaactgacgtcgctctgcgagatcattccatttctctttcacatttgacattttccatccagaagaagttccgtctggattttgtccttgacccgcgttccgaattgtactgtatgcgccatgtaaacctttagctgaatttcgagtaccttgcaaaacaccggttgctagcttagatcccactgcagcaccagctgccacaccagcgcccccaaatggcaaacctacagtaccccctaaaatcccgccagttattgagccagcctttttgattttgttaaacgccgatccacccgctgcagccttacttaaagtagatgcaccgacatcgttccccatagatacttcagatccgcctggcgattccgttcccccacctgttgaacctgtggtgtttgtggtacgcccttttccggacatattcatgacacctttagataacatcatggctccgccgatagcccccaagcccatagcattcgcagctcgacctacagaagaactcgagtctccgaggttaagccacttacttaccatgccggttataggaacaaacataatgatcatgccaagtttaaatatcattgggcccatcccagaacctaaattacctgccatttggacgaaaacgaatagaataatcgcatgaatagccggtagaaagatatttccacacaattctttaatataggtaccaaaaaatgaacgcgtttttgcaaataacaaactgtaggctgcaaaaggcgacatcacacaaaggagaacaatgattatttttcgtgcaatgtaaataaagttaagatatgctgaaaggccccactctgctaagaatacaaagagatctcccatcttaaatgagtatgcaccatcatttgtagcggttgcgataatagaaactccatctagaggttttcctagccctttaagcgtagaacccacgccttgtacaattccccaattcagtgccatcaacgtatggaataacatccagaaaagacccataaaaaacgcggatgctacatacatgtggatatctttccagaaatcttctttcgactgaggactgtgtgctttcattccaaactttaaactggacatcatgatcgctagcatcaaaatggttgcatagactcctgaaaacgtagcaattagtggattgatgacatgatccatttcagattgataaaagatgccatcaacaagctcgtctttttcattttcaccgaatccccatgtcttgtagggattaccaaacaccaagttttggatgctattaataccaggtatcttaaatagattgttggcttgtccgataataaaaccgttcattaggttcgcatcatcttctgctttgtctaacatttcttgcgttttctctccgaccagagctccactgttatctccgccactaccgagttcttcaggactgaaagaaacatctgaacttgtcccatcggttgtacttaaaggtgttgctccactacttttgcttgtcgatgcagccacggtttctgacgtagtattcgttgatccgcaacccgcaagcaacattactaaacacaataatgccagtagcagattcgaacggttcatcacgccacaccacctgccggtatatgagttttatcttcaagccaacctatcatgtcttcacgagttgtctttttcttcatcggaacttcgacgttttggttcgtattcaggtatacccattcttcaggagtcggttcagattggaatgaaacgatctgtttaccggctttcatgagcacttgaccagttgaagatgtcctgatgagattaccaacatcttctgaaagcctgaaagtattgagtatcggggaaatatcttgatcactttgtctcaagaagcaaaccgtatcaaactgagccacgacatctctggctgcttctgttcgctcaaacatttcatatcgttgagacactaaagtaagagatacattccatttccgtcctctagcagaaaggattttaagccattccatcatggatgcatacttgatcatcatccatgcttcgtcacaaataacccgctttttcactttcggattagaaacgatgaatctactccacacccaagtcataagaacgtgttgagctaaaggtctttctataccattacttgaaagtttactaatatcaaaagtaaccacaggtgcgtcatccagagagacattattttcggatataattctggtttggccatcgaacataccaaatgctttgtttctcgtgaatagttttactacgttacacagttcacggagctcctcaccataatcattcttagcctcatgtagaagtgcatcatacacattagtgatcgtcggcatttcaattaactttttgcggtacgtaatagagccaaagtcatcaatatgttcaatttgttcgtaaatagagtctggatcctccgttatccctcgagagagatataattcttccaaaatatcattcaagaccccgatttcgacagcggttagtcccctattatctggcgtcaatgattctttcatgactttgaagaattcaagagcttctttgaccttctcattcaagttaattttctcatcaataaactcatcttctgtgcctttgttcttgatctctttttcagggaaaatatcgagtggattaattcgactaacatcatcttctttggatggatagatcggaacgaccactccaccaagagcatacgttaattcacgatactccggctccacatcgatgatcacgtttttcataataccgtccatgtagccccgtgcaataatctgctttaccaacacggatttacctgacccggacactccaaaaatgccaagggaatagttatttaatgatgcatcaaagttgttatagtaaacataatcacgaccatagcgaccaatagggaatccaccttgatgattcaatttagatgatgcgtgaggaaaaatggccgttagcgcaagctgatccaaattgcgatcagatttagaaagatagtttcttcccagtggcatacatgaaagaaaagcctctttctgtcgatcaaaagcacttatgatttcaatagattcaccggatacagcattgtccacttccacacacttcgcgttaagctcatccaaagaatttgcgtagacacttgcttgaatggatacataataaagcccattttgattgctctttatctgacgttgaaggaattttgtatcatcgcgcttctgaacggaatcatcaattttggcttgatcatttcgatttgcagcagaataaataactgtatctagttcgtcaattttatcttgaagcttcttgatcgcaacgttgcgatcaattggttcgatatgtacggaacaatccaaatcgtccccactaaagagtgcttcgagccaccctattcgaaccgtacgtgggtaaccactcggtttaacaaaaaaggaccttccatatttcagattcccaagtcccgttttcaaagtgaaataatcactctcaaaatgagctccatcattcaacatattgtcaacgatagaggggaatgaaagtggtatatcatctttactgcctttgcgcacatcatcaatttgcaacttcgatgagtcctcttgcttctttttcagacgcttgaacatagtctcgcacttcctccacttcatatactagatcttcaaatccaggcatggtagtaacgtcgacagtaatatacgaagatagcttttctcttccatgtgtaaccaaatcatcgatcggattcaataccattcgatcccggtttagtgctcttttcattacttccatagcagagagggaatctaacaattccgcgtgtatttcgcattgtcttaacattcctactacggttgccgcacgttgatataattcatttcgaatcatttcttcgcgttgttcgggtttgagcgctcccatcttactaggcaatgggacgtaggtgatcacataatacacttttcgagatattcgaaattctttttcggatttgttcttgatatgattaattacttttgtgttgtaatccatagtttgtgcattacatttttctaagttagatttccaacggttctcttctttccgtagatcctgcctaacggcttgccctaaaatctgaattgggaatcgaacaactctgaataaactgctgtatcccagaattgtggattggcgagcttgagcactcaaaagatcataattgacagaatctgtagagacgatcaggcaatattcgttatttcgcttaacaaagatgccttgtttaatatcctcaatcccgatcagatccttcatgtcctgccgatcttttttgagttgcttctcctcgtgtttattgaggttctttttttgatgctctacggatccagcactcacttcctcaagatgctgttttctttgccatccaataataggttcattcttgtccatcctcttttttgcaatcattaggaataccagcattagtgccaggaatcccatcatgcaaaaaataaaaatctgcatttaaggtccttctttcgtttagttatgtgtgaacgttttttgagagcgtagaaacttaatcctagaaacgacaaactcactcgcatattgctcatgtttatcgaacttaaaaaatgcaaagaaagctgcaatggcacctaggataacaaataaaatcaactttcctatccactctgcaccgccatccaaaaagggaagccccccgaagatgaaaaagactccgcaaaaaacgagtgtaggaaatataattaaaaattgtcgaatcgacaagacagccaaaattgatttttcctcttgagtgatatcaatcggtacgactatttcattgttcataatcaaccccctagtgaatgagaaacggtcaccgttacctatatgatttcagacatatagcgtcctcatatccggattgtgaccattgctcagtgcttaacttctacttcgctgaatttgataagcccgcaataacatccgcgaaggttgcggcaccgaagaagacaaatgcccccgcagcacagcccaacaaagctttccaataagttgctgccttttgaggattaagcgaaccaaagataatcattactgcgtagtacatgacagccagtacaaaacatgtgccccctacgcctccaaaaatttgtacaatcaacttgagaggtttattaaccttatcgacattagcttttttagctacgtctccattgggatcatacatttttccgtcctttaactccgagtctattacagtgccattggcactcgcgctattatgaactacaagaccgaatactggaaatagagcgaacacaagtgctaaggttaatacaattttttttaacaagataattctcctttcgcttataagcggtgttaacatatttgttttaaaacatgtgttactgagttaaactcaatttgtaatcacaatctaacgtacattcccccttttttgggaacaaaaaaaagcaccgccaaacctttggaatttatccaaggtaggcggtgcttccgcttgtcagtattaagttagttaaagaataatctactatgattatccttactaagagctttaatgtcaagagatgttttaatatctagcatggtgtatccctcgttctacaataagttcaccatcagcatactccccattctcctcaaccgaataattaactagaatagtcgcatgatcaatcggttcattttctttcagtacagaatcgagaatcatcaccaatgtcttaagaccttttcggctcattccaataggagtagaactttccgctttccccgtacacacatccatagtcttaggacttaggaccttcttctctaaaacatgattaatggctaggcgtccgctacgtacggagaacttcaaagaaccttctttcttttttgacatcactaatgggtaacactccactaatatagcagccttgatctcttctactagtatactattgtcaagtggcttattcattacctcgctaataccaccggttcttgcaaattgttttgacatcttcaacgcctccactaaatgtatatgttataggtcaaaagatttaaaatataaaaaaatagtgcaaatatgaatctattgtaaaaattatgtatgtaaatatttcgatttcactttttcatatgggtaaatatgtgaaacttcatatgaatgaaatcattttacacttctgttagaagattgtcgatatgaatttgcgaaatattaggaattttgacttataacagtgtgtatctccgctttctcaaacaaccaatagtcatatgtacctatcggatatatgagaaagcggagagcgtctaaactcccactgttattagtcttttgtgagcattcgtttccagatcaataaatttgtttgcacaaaacaagttcgatttaacaaatgagccttctacaaggtaagcaccctccatttcagacattccctgaatctggatttgttgttctgcatattgtagtattgtgacgccgtttatttggaataatctccccatcattacatcatagttcccagttgcacctaatgcaggggtcgtcgtaatcttatctacgagcttcgattcatatttacctctcaaagcccaatattcacgcagtccaataggataatttgagcgatttgcaaccgattctgtattaacagactcagtacttaactgttcatttctagtattaatagaaagaactttctctctgtactccttagaagtatacgttaattcctcactgataccactacatgatgtagattcgccttcccgctttaaatcacttttctcatcaattgctttaaacagttcatctaaagagttgttgagagcttcaggtagctctgacacttgaaagactttagttttcaatcaaatgattcccctcatattttgattaggttttgtaatatatagcataaaaaaacacctatagtgggttatccgaagaattaactccaccaaaggtgttttgaaataaggaaaataaataataaaaaccctaaaagtacatagaagtatccaaaatgatactcaagcacctaaagagtgtatttagacataaatattccaataaataattcaaattagaatgacctgtttgcctcatggctcaggtaatagaataattaaacaattgatatagttctataataccaaatataattcgactcgacaacaccataaacaaaagaatagaaaaaaacagagcgggtgatccccagtttctgaacaaatgaaaatctactgacccaagagtttaagccagaaaagcttaatttgaagtgaatgacgattgccacgcactaccatatctagtgagcgattcttgtatcattcaagtcgtatttaacaaccagattgcagcctactacttctgagaatgaaacgaaaatgaggcctatacatcgtagactttgctaaaagtgtataccaagcaaatagacatgactattggtcgttcccagcgtccagaaattctagtacgcacgatatacgtcgggataattgcctggaccacacatctatagaaagcttcatctcgtatctcaaaacggaaggaatctccacatctgcaaccggagatgaccgacgtgcaaattaaataaactgacgccggttgtgcaccgacgccagtctggtatttttataattgtcctccatatggagtattttccatgtcataccgtggcccttactaacacatatattaatcctaatcctaataattcagtcatctctagcattcgctgttgtgggattggtataggacactagagttcaataaggattgaattttctttccctatttccgtttctgttccagtatccggtaatccgaacatctcatgatcagcaaacttttcagaaataggtttttttgctacaaaagaggtaaactttgttcctggagctttagcagcataagcctctgccttcccttggaaggtcatgataatcttcttcacttgactcaaatccacgccctcattaagtacaagaccgcctcggtcctcgccaggtacctctatcgaccatactgacaataaacctggcataattctgctagtcccgtcacccacagcaccaccagactcattccgaatgagttccttaggttctatatcacctgttgcacctcgatccggagttacttcatattcaaagaatccatggctcttgttgtgtacaaagtcaaaacgttgaccatacgaatctagaaatgttgaatgacctgagtgagtatattcaatgtgaatgcttcctgcggcattccgtgcaccaggtatctgaatgtggcagtcactaaccatcatgtgagctttacctgcaattctctcccgaatgagttggttatccagtgtcaaggggaagaatgccgttccatgtgctcgcagcgtttcaaattgctctgggaaagatgcttcgttaaagataaccgttacgtttttgaatggttgcaccggattttctgaagcatttagtgcgtttgtcaacttaacggttatatcggcatgaatacgactaagctcggcaacgtggctatcttgaacaaacgggaacagctcttggctcaggaccatatagcgatatgcttggtattcttgatacaggaaatctgttaatgccagctttaagccgttgtacaggtcgaaaatatacgtatggaacagtggcaagcccgcatccacgtcatctcccattacctgcttgattcggtcttgatctgcacgtcgttgtgccatttcagcaaatagttttgcttcctccaggtgtttagctgtcactgcttgttttttgcgctggtattcttcaacgacgttgagatattgattaaaggccttacgatattcttccactttatcttccggcatttgatcataaaccggttttaacatctcttcgaatttctcacgtgacatggcaagcatggatgaagaatatccaaaggaatcacgtgcttcttgcatttgccccatcagattgtaaatctctattccatcctttataattgctaaccccgaagaagcagcggtagtcacatttttaatggatttagaaagttcctcttcttttttctttttttctttttctaccgttttggcgtttttgaacgtatcgtctatcacaatggtcttacctgtatcccagtagttgctcattgctgatgctatggcaccgcctgttttgagcgccgtaagggcgggggttacattggtaaccagcgctacgccgttcactatcaaatcaaatgtagccttcagggtggacaaagcaagtttcttccgtagcgcatctacaaattcttcagccactttctggagcgacttctcttttgaaagtatatcttcatatagcttgtctgcttctatttccaagcgcgcccgctctttaattgaatcttgcctttgaccctcgatatcattaattcgatttactgcaacggtgatggcatcgtttaatacttttaagcgccctctttgatcgttctcagccaagatgtaatcacgatataacgtttcagcttgttgagctgcgtttatcagattgacacccaagtcttgatatttatttagaggcatcagaggcacccaattccatggatggctaaaatagtctagaccctgtcccaactgtgtaataaggatcatcgctttatttcgtagtgctagccattgaatggaagcgtccagcatgtcgctttggaatccagaataggtactttgagctcgtacctcattaaaccaggactcattcggtattgtctgttgcagccagtttagtaaatcggcagcttcttcgagcttatcctcacttcctgacagataagctaatcctgccttatgtaaggttaatgtttgacgttcaagtgaggcacttaagccagtttctaaatctacaggagagagtctcttatatatttccgtatcggcgattttcgctccataaaattgactatacccaatctgtgcaataatggattgagcaggtttaccatcaatcgcatgttctgcgctgatccctactgtgccatttacgccgtcctttccattagcggatctcttcgtactgctgcgctttgtaacgcttgatttcttccctaccgagactgtctccagttgaaggccacctatgcctccctgacatccagctcctgcttttccgggcaaggttggggctccagcgatacccacttgcgtttccatcgttattctctgctcttcgcttgaaaccacatatccaataaaaatatgtccagcgtctccaccattcccggaccttcctgcgttaccaccgtctcctccattacctccatcgccacccgatgtggaatgatcattaaaccagaatatatgggtttcaccatctcttccatcatctcctggccggccatccatcccgtctcctccgtcttgcccgcgacctccattactgccatttgctgagagattcaattctccttttagattgaagcgctctgctgtcagtacaagatgcccgccggccatcccattggctccactggaaccgtcatgaccctttccgccatcgtctccacttttgatcgctttgatgccggaatcggcctttggttcttgtacgaagtcctgatccggaggaacgggtaatccagacgtactaatagatatgtttccatgggaagaaataactctcgcatttattattagattacgcccaggcaaacgtatcgatccatccagatggacggtatctgcctgaacccagtagtgagctgtagcatccgaaaagtaatcttgctttaagattaaatcggaagctgttagataaataaaatcttctttttttccccgctgaacattggaatacaatgactgagttttgacttctgcaactcccatttctggttcctcctcttaggtcttgataattattaattcatctttatgtaatccaaaagttctatttaataacttctgaaaagtgataattatcactttatacctaattataagttaattttatccataaatatatattttttttgatgattttcgacttttattttcataatatgctttttatataatgttgttttcttacatcactgaatgctttaatcatgacttattccttaacaaatattatgcatatctctttaatagttatggtgcgatgatcactttacacagcatgttgaaattaaaacaacacaactacatgaaaaatttatgtacaacgttattatctcactgccaattaaatgtccatgttgtctttatcttttttctatcccacaataaagagccgtccacaagtagttagttcaatgtcgaaatagaaagaatatattgctgaaataaacctcctccaaaaaataaaaaaccacgtcttgttgaagtgaccccgtaaagttagacagattatctctttaagcaacttgttgggcatgaatccggtaccgtaccggactcatgccttttagttttgccttaatgcgtttgttgttgtaataatcaatgtatttggatagttcttgtttaaaatatgagatattttcaaattgctttaaatacaaaaactcggatttcatgatgccaaagaagttctccatgacggagttatcgtagcagttccctttacgggacatactttgcgtgatgccacgtttttcaagggcatgacgatatggtctcatctggtagtgccagccttgatccgaatgaataaggagttttcttcttttgttaaactgcaaaatgcttgatctaacatcgtggaaacaagcgagtagaccggtcttgaaccaatcgtatatgtaataatttctccgttatacagatcaagtatgggagataaatatagtttttctccgatgtcaaagctttccgtatttccacttgcacggttcaagacacgactcaaattcacacacatatatgctattgagaattccatgacatgaatgattccatcgaagcgatggatgccgatgttatttcgatcgagacgtcccgcagtcacggtgaactcattcacagctttgagttgaacacgtataaactgggcattggacttggcgtatatgatatccatagcccacgtgttccaagtgtggatgaaatgacaagcatgatcgaacgtgccttgcgtgtattggatcctaaactgttctggattaatccggattgcggtctcaaaactcgtggactcgaagaaaccattgcttccttgcgcaacatggttgatgcaaccaagattccccgtgagaagcatgttgcagcaacggtttaagttgaatagataaagaattcaagaattcgtttataaaaggcggacattcctatgttatggaatgtccgccttttaaatgaaccaataaaaactgaaactgcctttttgctcatttttgcatatccgttcctttgaacgagatctccaatcctcgctcaaccgcaagttcaaccgctctcagttcacaccaatggcgagctcgatgagccggtcaagaatattggcataagtcatgccgctagcttggagcatgttaggatagcgggaattcgatgtgaaaccaggtatcgtgttgacttcattgaacacaattcttccgtcagtgtccaggaacatatctactcgcgcaaaccctctgcatccaagcgttttataaatagtcagagcgctctctttaaccttcattgcagtatcctcatcaatacgggctggcaagtgaatcttcgaactcaacaaggagtacttttccgaataatcaaaaaagtgtccctgcaattcaatttcatcaataacgccgattatgggatcagaattgcccaatacagcacaccccacttcaaaaccgttgatattttgctcaatgacaactttactatcgtgtaagaaggcttgttcagtcccagtaatcaattcctgcctattgttcaccttcgatatccctaaagatgatcctgatctagccggcttaacaaagagagggtaacccagtgcttctgctgctgataacactttttccatccgttcaattcgatgtattgtaagggaacgcggtatatcaatccctgctgcctgcaccagtttatgagccagttccttgtctatacataacgcagaggataacatgccacatccaacaaacggtatacccgacagttccaataatccttgcaaggttccatcctcaccgtatttgccgtgaagcactggaaacacaacatcaatcggtgttacatgatattccgtatgcactagctcaatgagtcctctgacttctctgctcggtgagaaaaaggatgggatacaactcggatgcaaatgccatcgatcattgcgaatatcctcaaccgttccactatatctgagccaagaaccttgctgcgtaattccaattaacacaagattgtatttttcggtatccaaattttcaatcactgaagcagccgaactcaaagatacgttatactcacctgaacatccgccaaacaataccgcaatcgacttcttctgcatcttaaaatcctcctaaaatgtaatataatctatataattcctattgttataacttaattgttggagaaagtcgtaacaatgaatccttcacgattcgttcctgatatccgataagaatcacatttcaagatcgggatatgactagacgcctctttatccgctggaacataatatatctggattgtcatgtcctttgctttaactgtgagctgctctccagagtaccgatattgctgtacaaaatcgatgtactcctctaaacatagattgttttcttccatgattttggaatgggggtatcctacatatctaaaatgccatggctcatacgcaatacgagtgattgattctttttcttgcttatatcgaagaataaaaccgaattgtatggcatgttgtctgaaggacctgtatatgcccgtgtcaggaaaggaaggtgcaataaaatcgatattcgatttcaatttaccgacatcgatagccaaccctgtttggtgctcactctggtcaggcaaggctacgtatttggaagtatattctggtccctgttctatcaaacaatcctgatagatttgggattgttcttctttggttcgatatgcactgacagcgacaatttcatccatccccccacaagccttaagtagagcatgaaattgtttgaagcactgcttctccagaagcatctccttatttaacttctttattgaaagtaaggaatccaaggactctagttgattagcttgtacttgccttctgattgggttttgaaaatttattaacactaagtgcccgtgacatagttcttcgttacttacgctgatttcaatatgttgttgtacgacttcccgtgatttcacgttgaatttccccgccttctttatagattcgcaatactctgtccgtgatggaactcgttatttcttgagatacaccaccgatatgattggccagttcctgaaccgtaattttctgttcacctgaataaccaatgaaggtcactttggatccttccggaaaatacatgggaagcttaatcatcaattgatccatggagatttttcctataatttctgcttgatgcccctccaccaacaccttcgtattttgcattctctgcgaccatccatctgcataaccgataggcactgttccgatccattgatcggagtctgtttgataagcattgttgtaacccacatattcgcccttttttaatcttttcgtttgcaataatctactgtgcatactgaatgcaggctttacctggatgttcgatactagtttttccggataaaaaccataaattgcagctcctattcgagccatatccatacacaattccggaaatcgaagtgctgccacacttcccgcacagtgataatgattgactggaatctgggatatactgctccattctttcatttccaggaagcgttgaatctgaagctgcagatagctgttgtctgtctcacccgctgtcgcgaaatgagtatagaacccgtctactattacatctggagcccggagccatggaaccatttcaagccattcttcttccgtacgtataccgattcgcccaagtccagtatccattttcacatgcacagatagcttatgccgggtatgaacaggtttgtattttctcatctgctgaaaccatgaagcttgtgtaacggtaagcatcaaatcatgttccagagccagaggtacaagttcgggacgtatcggagtcaaaataagaatcggttgtgctaagccggcatttcttaagcggatggcttcttcaatgaaggcacacgctaaataatccgcgcctgcctctactgcttctttggccgtctcaatatctccatggccatatgcatttgctttaacaactgccattaatttggccgaacggggtagaaatttgcggatctgtatgacattctcgcgaattttcgttaaatctatttcagcccatgtatctcggtacattcgaataatcccctcaaccgaatagatggtatgtttttacttactatttttagtagatccgcatatgcacttttcatagtttggcctcctaaaggtgtgaatgtggtgcgttgaattgatttaagtgtatattaaggccacttcagctcctatcgatcaaacttacacaaaactgacaacgatgtaagattacagatttgcacttctccacatctcatagttacaacaaaaaaaacctgcactagggcaggtttctttcattattgtagattttcattgctcatccagctatcaacatacagtggttcactgtagtcctcccggaccgtaaattgtttcaaatgtttctctgcatctgcacgattctcgaagcctcccataacgacggtgaattttccattttgacgatttgcggaatttctcaacggagacgatctattgcatcatcttgaaacaaccaaaaatcgatcccaaaggtaccaaaagcaagaggcatctataagcaaattattatgaccaaatccagaatggatgagacagatccccattatctccactttataaatgaaggacaggtgctcgtacattggaacggggaaaaatctttctgttccatttcataagcgtactatgtggagaagcgtaacttctctgaagatataatgaaataaatcccaatactcgaccttgagcgcagatctgggaaccaccaggtgcgatgatggcgcgcctgaagggactctgtcctatcaatgggaagtcgtcagcgctctggaaggcggctgactatacctccaccggagaagtgacgctgatcgttcgaaatagcaccgttccttttgaaagtgtaggagcaagtatcaccaaaatgaatcctcttgaaaatttatatcaacctcccttaacttgattgtttgataaaattgtaacgagattaattttatttttgaagtcctccgagccatttaactccactattaatctctctaaaaaacggatgacatcgtctagtgatagtgaactagattcaattctacgtaaaaacattattgtaagctctctcacttcttttaaggcaatatcatttctgttttttgatgcatatttacttagataatataaatcaatgttcaccttagtaatctttatgaagggagtgttactgtttgcagctcttaaatctctcatcaaatttaaagctgcacctaatgaaacataaatctctgtgagtttttttaatcttttcttctcccatttctccctgtatatttggcctacagtgtcaaagataatgaaagtcaaaaatgcttctttgattttaggtaaaaactctatgtacatgttgtattgatttattgtgtattcctgtccaatcatcatactcgcccaacgcatagggttatagaaaatatttgaaaagattcctgacgtaaaaccatccagatttgaaaatacatacaatattcctgctaaccaatataactctaatctaaagcggaacaggatgtatacaatgataaatattattactgctgaaaagtacaaactaccatttaaaatttcattgcttaaattagagatcgacttcatatatgtaattaattcttcaagagttaagttattatcgaccaagtaatccatatacgccttattttctttaagctgtgagagaaatgaactctcctctgttaaaagctcatgaaacattgcttgggtgttatctggtagatctttttccataacaataaaagtttttgtaatggtattccctatttttgttttagcatcaatttcaggtgagaaaaagacgtcctcactatacttgctctcagtagcatatctataatatgcatccggatcgactatgttagttattccgaaaagtaacatggatataactaaaaacaatggaaagtacaataaaaacatacctaatataattacagtcttttttaaatacgcattccccaaacgtgacttattcattgaatcccctctctttaactaatcaaaaatacagatcgtatttgctcattggaatcttaataagcaaaagatcagaccctcttggtctgatccttcgctttcatgcttctattgaatcaaattcgacttcttaagtaatttttgaagtaacgtagccacttcagcacgtgtgatttggcccttcggttgaatcgtagtcgttgttctaccattcataatacccgttgctaaaccagctgctatatgacctctggcatagcttgaaatcgatgaatcgtctttatattgtccgatcaacgtgtttacttgatcaggcaataaatccggattgatacctgtgatcttcatcgctttcgcaataattgtcatagcttgttcacgagtgatggtatccataggagcaaattcagcatcattataaccctcaattaattgatattcgtgagctgtatagatataatcagcaaaccaatcggacttatttacatcgataaatgaagtttcgccagttaacggtactatacccagccctcttacaaccatagcagagaactctgcacgtgtaatgctcctattcggttcgaaaatatcctccctaactcccgtaacaatcattcgtgatcccatgtcattgattgcgtcttttgcccaatggttcgtcacatcagtaaattcgactgggtgccaaaccagtgtgtacaagctattggacaagctattaatcactgcgtggtagcgattatctttcttctcaacataagttggtacatgatgagtggaaccatccgaccctacaacaattcctgtcgtaatctgatttggatcgacggtctccggaagtggaatataccgttcaacgtacgtattgaagcgatttatttcctttcttgaaccattaaattcagccattaacgtaaaatggacaggatccactaaaagtaaagcaccttttgaaattgccgagtccttagcaatgcttgattccgaaggaagagcttttgagattgttaactcaatcgtcatgtctgatagtgtataatccgcaccaagttgacccgctaccgcctcaattgagatttggctcgcaggtagtctatacgtggcaagcggggtgaccagttctaaaacagcagattgatctatcatctttttaacaacatcccctgttaatattcccacaatggaatccgatgactcattcacaggaatagtcactacagcattctgaccttctttcgccaaccattctagaagtttgctaggatccggcgtaagagttgttatggttctattatcaacgatttttgtatccaacttgccgatcttctctgacttaccgtttattacaacagggacaccacttggctctagctgaggtgggtttgctgatggtgttcctccaccttgtgagcctcctccactgccactattgtctgaattcccaccgccacctgaactattggaagaattgacagtaagtacaaggttagttgttgctatttccccgtctccataaacagctgtaatcacggaagtataggttccggctggtaagcctactaccggtctaacgctccacgtatcgatactttcacccgcagctacattattgccacttccttcaaccacaaatgcattgggttcactggaagtcagactacgaatggtggtatcaaccgccccggcattcgtgatgattaatttctttgctgaaggttgctcataaccaaccgttacaggtgaaaataatggagccacaatacttaaaaaaggtatcgtctctgaaatatcttcgaactctgcgctaatggtaacatccccgcttggcatgataaaagtttcacccacgatcggataacctacagaattaaagatatacttcagcgttcctatttttactctcttcccgaaatccggtagaatgttcaagctaattaagttaccggctggggagatcgtaggggcagcactaattgtgccacctaccaaattgtttattgtcacagtgtatcgttcaatttcagtaactacgtttattgaagcgttgcccgatttactgccgttgaccgttgagatcgcggtaatcgtatatggaccaggtgttgtgtttggagcgacacttaccaatccattttcatccactgtgacatttccgctcgtatcactgctgctccatgtaacggtttgggctgctccaccacttacattcacagtagctgtcagctgctgtgtgtcaccttgcagcacacttgaataggtaggactcacagttacactattgacttctggtgcagaaatcactgtaatcgttgcactacctgtcttgctactatcaaaagtagaagatgctgtaattgtatacggaccaggtggggtatttgctgccacacttaccaatccatttgcatctaccgtgacattgccattcgtgtcactactggtccacgtaacggtttggactgctccaccacttacgttcacgttagctgttaactgttcggtattgccctgcactacagtcgcactggatggactgatggtcacgctgttcactgccggtgctgaagtaactgtaatcgttgcactacctgacttggtaccgtcaaacgttgacgttgctgtaatggtatacggaccaggtcgggtatttgctgctacacttaccagtccgttcgcatctaccgtaacattgccgttcgtgtcactactggcccacgtaacggtttgcgccgctccaccactgacattcacagtagcggttagttgctctgtatctccttgcaccacattagggttagacggactgaccgtcacactgtttactgccggtgccgaggtaaccgtgatcgttgcactacctgacttagtaccgtcaaacgttgacgttgctgtaatggtatacggaccaggtggggtatttgctgctacactcaccagtccgttcgcatctaccgtaacattgccgttcgcgtcactactggcccacgtaacggtttgagccgctccaccgcttacatccacagtggcggttaattgttctgtatcaccttgcaccacactagggttagacggactgaccgtcacgctgtttactgctggggcagaggtaaccgtgatcgttgcattacctgatttagtaccgtcaaacgttgacgttgctgtaattgtatacggaccaggtggggtatttgctgacacactcaccagtccgttcgcatctaccgtaacattgccgttcgtgtcactactgctccacgtaacagtttgcgccgctccaccgctgacgttcacagtggccgttagttgctctgtatctccttgcaccacattagagctagtcggactgaccatcacactgtttactgccggtgtcgaggtaaccgtaatcgttgcactacctgacttggtaccatcaactgttgaagttgctgtaatcgtatatgtgcctggtgtagtgtttacagccacattcaccaatccattcgcatctaccgtaacattgccgttcgtgtcactactgctccacgtaacagtttgcgccgctccaccgctgacatccacgattgctgtcagttgttctgtttccccttgcttcacacttgggttagctggggtcacagtcacactattcacgtgtggggcgggagcagactttatatgaccgtcatatgtttgactgtcataacctactgcaactgctcgtcctccacctataatgacgtcagcaaaatcgatcgatgaggatagattactccattcctcttcccaaacaaacccatttgtcgaggttgccactctttcatttgcgctaacggtataaaatttacctgcagcataggtcactgaagctaaactaatgttgctgtaattcaataccgtcgtcttgctccaagttactccatcatttgaaacgtaggcctgtccagcctcaccaaccgctacaaatgtattgtttccataggcaatatcgaaaatggcttgattcggattagttgtataaacctcactccatgctaacccatcggaagaacggtagattttagccgcttgtccttcattataggtcgttgcgataaacaccccattgccgtacactactcggtaaaaatcaaggtttgtattcgtatacactacctctggggtaccattttctgtgaatgaatatagtttttcttttcctgctaacacataacggttagtaagggaactataagtgatatcgttgatatgcttgttttggaaaaatgaattcacaggcgtccaaccggttgtgggttcagatgtcttataaactccgtccgaggcagtaataaaccaagttgaatttaaaaacttgacgttagtcggttcaatggaaatctctagattccggttatcccaggtcacggaatctgtcgacagatgataatctagaaaataacctaaagacaaaaatgtaccattgccatattccacaaaagtttgaagacttgcaggcacctgatgtacaggactccaagtcgcagcgttcgctttagaagaaaaaatcccaccactaaaagaactaatgagtaaaatacttgccaatgtagttcggagtatacgattcaaattcttttttctcggaaacaaagacatgtccggccccctaaaatgatttaattggcaattaatattgcctatctatttcccgatgaagtttgtcgaatgatgaaatggaaattactctcatcataaacgagactttgatataggtaaatataaaattagggacttttttcataaaacaatgactttcaacccatttccaacttgatttaacgtgtttttttgaagttttgttataaattttcgtcaccattcgatttgaaactgcaaaatttttaatgacagcccttcctccatctgttataaacaaattatgacaactatatctagccatcaccttggaattaagggagagaattaaaaagtgattgatacagttgcctcaaaactagaagatgaagcgtttttgtttcagttgtattcattaacccgccaagaagaattacaaagttggaactgggagccagcggaacaagaactatttttgcgtatgcaatggagagctcaaaccatgtcttatgcggcttcttacccagatgccattcgaatgatcgttcttgaaaataatatctctgtaggtcaaacgtacgtatttgaacaagggtccgaatgggtgctcattgatatatctcttcttccggagtatcggaatcggggcataggtatgagcctaattatggatctacaacaacgggcaagtcatgctggcgcaactattcgtttaagcgtactccccatgaacagggcaatgaggctgtatcagaagcttaacttcgttcctgtacacagcacaggtttatatcaacttatggaatggtatcctttgagaacaaatgaattaacatcagaatctagtgaggtgaaagcgaatgagtgaagcttatttaggtgagattcgaatgtttgcggggaattttgctcctattggatgggctttgtgtaatggacaaatagtatccattgctgaaaatgaggctctgttcgctctacttggaacaacgtatggcggagatggccaaactacgtttgctttgcctgatttgcaaggtagagtggctgtacatccaacccctacgttgattcgtgggcaaaaagcaggtaatgaggcggttacattagtttctaatcaactccctgtacatacgcattcggtgtacactgcgtcaaattcctctacaattacctcaacgccaactaatgcaacctggtctaactcaccacgaaaaatctattacacgtcagataatcccactactgtgaatatgaacaatgcagctgtatcttctgtcggtggaaaccaggctcatgacaatatgatgccttcaacggtcatctcgttcattatctgtctagagggcatattcccgtctcaaccttaaagtgaataaaaaaatagaggaggtcacctcatgtcagaaccatttttgggcgagatccgattgtttgccaacaactatgcccctcgaaactgggcttattgcgaaggacaaatcttgccgatcaacagtaatcaagctctctactctttgcttggtaacgtttacggtggagatggtatcactactttcgcacttccagactatcgtggacgagtaccgatacatgtttcaaatacaattcctctgggcactaaacagggtgaagcagctcacacgttaaccattaatgaaatgccgatgcatacccatcaagtaacagcttctgaaaccaatccgtcggtggcaaccccactaaacaacgtttgggcagctgttccgaattcattcggatccaccgctgggcaagaaactatgaattcaggaagtctctcaggagccggaggctctcaagcgcataacaatatgcaaccctacaccgttttgaattacgccattgcgattcagggaattttcccttctcgcaactaataaggaggacatgactttggctgatgcatatatcggtgaaatccgaattttttctggaaatttcgccccaaaaggctgggcattatgtaatggtcaattgatgtcaattacccaaaatgcagctctattctctatactgggtgtacagtatggtggagatggaaagtcgacctttgcattgcccaatttaatgggttccgctgttatccatcaaggttctggagcgggtctaactcctcgtactgttggacaacaagttggagatgcagcggtcacgctaaatcaaaccgaaatccctgctcatacgcacacacctcaaggtattgttgcgacaggaaatcaaacttcacctaaagatgcctactgggcccaagctgccaaacccattcctacagcaccgcagcccccattgtacaataacacaccaagcacagatatgacgcctatggctgtaggagtgactggttcatctcagccacataacaatatgcaaccttttattactcagaattttattatatgtttgcaaggtgaatttccttcacgtggttaaggaaataaatatcaatatataagaaagaggctgctcactaggacagcctcttttccctttatccaagaaattcatttcgatagctttcgtcacaagaagtagtatgcttattttaacaaaataaagcatacttatggggttctcaagtaaaaatctcatttttgatatatcttcagtttctttggagcatttcagttataccggatagttaactaagcataaaaaactccatgaaatcctggaagagcccatttctcataattttaagtaacacctggacccatttgatttaattcctattacaaaaagttgctaacgacttataaacttgtataaggagagtttcaatgctatatgaactaggtcaaaaaaacttatttttgtttcagtttaatgaaagtgatattgagtgggagaacaaacaatttctctgatcaacttaaataatgtgattgaatgtgttgataaaagtttttttgcagatatacagcacttttaatcttgctatattctccgtatgattatgaatataaatgacttaaaactaaatctataacttcgtcatatgtcttaatcataatgtttttataatcatgctctaaccttttccattctggggtatctagcatccatcgtctccccattaccaaaattcttttcggataataaacttttattccatgctttgcttccgcaaactctctatttttaggatcttcaaaataatacgcatagtctcttgtttgactaacatatgaatgaatctccgcactgaaagtttccctattcttccgccctactatgctatttatatttttcaaattaggtaatttaaattcaactatgtccgaatacccatctgatccttcaataaaaaagtctggtctgatagctttacgttcttctgtttgccactctaattcacattcaggagatatttttttacccataaaagccatttttaatataaactgattttcgatttcagctagaaaagcagttatttggggttcactcgtatccttagaactaatcaattcaacgaaacgattcaaactataccatttttgttctctaaattcagaagggagagggtactgaaattgaacatcatgcattatgacttcttcaaggtcaggccacatataaaatgtaaattcatctacttctgcatccatatcatctatctgtagtggaaataaatctaaccactttacatttctggtaactaaccctgaattattagttccataaaagaaaccattaactattctatgaaatctacctttctgtaactcaaatccacttgtattgaaacctatttgcattgattgaccagcaaaattccaaccattcttaaacataatatcgagtgcttcattagtaggataaaccaggtcttcactatacttaggtaatagcattacaggacctgattgtttgctataatcgatgcctaatatgtctgttaatagattttcttcatttgaatagtctaaaattctaacctcaaccttgtgttttgaattaatttcttcagcattaacattccctatgtactcgacgccccaatgagttttgcctaaatagaatattactttctctggattcagtaagaattttgtgaaattcttttttaagtcaggatattcgactaggagactccataatctactccaataatttttcaatagcatattgcctaataaattggcaccgtccaccaaggttaatgatttcttttcctccactttttaatctccttttacaatgtacgatatacgttccctgtttttttaaaaatatcaatacacaaaccatattcatagtagtatcaaacatctttcgatacaacattacaagttcaccatatttctttgaaaagtaaggattcctataattcaatagttttgttccctgactctatagtactaatatttattaattagcataattgtaagtcattttttcctttgttatagatcttcattgttttatcttcgacacttattaagtgatcatgaagctcttaataaataggaagatataaatgtaactactttcggctatgcaattcatgagatctgacatgaaagtttttttgcttgaattgaaattgcaaaaaaattacatgttcacttagaactttcttacagaaataaactataccatatatatgccataatttttaagaaaacaaaaaaccttgagtaaaaatcaaggtttcttttcaacacgctatagtttgtaaagattactctctaccttttctccatgtcttcctatacagaggattcacccaggaagagagttaacctcccatgaaggagctatgatcttctcttataccgccacacgcatatataaatgagccatgaagggctcgaaccttcgacaccctgattaaaagtcaggtgctctaccaactgagctaatggctcttaataaaatggcaggggcagcaggaattgaacccacaccaacggttttggagaccgttgttctacctttaaactatgcccctaaaaaatggtagcggcgaaggggatcgaacccccgacctcacgggtatgaaccgtacgctctagccagctgagctacaccgccttattatgacccgtaggggattcgaacccctgttacctccgtgaaagggaggtgtcttaaccccttgaccaacgggccttacttactcttaataaagaatttgaaaatgtccactgttctcatcattcaaactctcaagaaaagtcaaaaaaaataccccagcggggtttc

SEQ ID NO: 16 - DNA, 121044 bp, Paenibacillus xylanexedens
  source 1..121044: mol_type = genomic DNA
cgaaccaactttgcaagctctttttttaattttctttcgaagcttatttcattcgcttgccgcaccgtgtatctcgtgtttttttggccggaaatagaatataccatgtacagttatgaaacgcaagtcttttttagataaacattaaattcttataaaatgagtaccctatagaccttttaacaagtatctccttataaccagctaaatgatacatctgcgcactaactttgatgatcagagtaattaacttacaaacgcaataagtttttttatatgatccttaatccaacttatagagaaactcatgttgtatacgtacatactcatcacgttatagaacttattaaccgataatttcattagataaacaaccaacagatcatagaacattatactcattccttctatatagaaggaaaacatttttgaaattcatttttcccaagaaaagaatacaaaaaaagcgaaagctccgggtttaaatcccgtggcttccgcttctttcatatataaggtatcaaacttatctccgtattcttcattaaacctaatgtacgcttactccccgccaataaatacgtatcggcaaattacaatgagcgccaagatccacataagccaatgaattttcactttacgctctgtaaccaagttactgaacaccgccagaatcacataagatacgatacctgcggagattccgtttgcgattccacctgtgaaaggcatcaatacaatggtaaggaatgcagggaaagcttgcaggaaatcatcccactcaatgctgcgcacttgactcatcataagtacacccacgatgatcaatgccggagccgtcgcagcggatggaacaaccagcgcaagcggtgcgataaacagggccaaaatgaacaacaaacctgtcgttaccgaagtcagtcctgtacgtccacctgcctcaacacctgaagcactttcaacgtatgccgtaatggtacttgtacctagtgcagcacctgcgctgacaccaactgcatcgacgagcatcgctttaccgatcgttttctcgccttttttcttatccttcataatccccatacgcgttgcagtacctaccatcgtaccaaacgtgtcgaacaattcaacgaaggtaaagatgaagatgatctcgaacaatccgagactgatggcacctttcaaatccagctgtccaaccgccagatcactgaagttaggcaaccagcttgcgcctgaaagaccactcagattcgtaacgcccatcggaataccaatcagcgttgttgctacgatcccgatcagcagagcgcctttgacgcgcataaccatcagaatagcaataaggagcaaaccaatcagggccaacaatgcatcatgatgtgttataaagttacccaatgacagattaaaactactacctggaatcggctgactcagatctgcgtctggtgcaacattaactgttacagccacgagattagcaagtttgaaaccgataatggtaataaagagaccgatacccaccgtaatggccattttgatcgactgtggaactgctacaagcagcatttgccgaatcttcgtcacggtcaaaataatgaacacgatacctgaaaggaataccgctccgagggcagcctgccaagtaatcgctccattcgagcttagaacgacagtcatgaagtacgcattcaatcccatacctggtgcgagcgcgattggaatattcacgaacaatcccataataatagtcattaatccggcgccgacggctgttgcaaagaatactgcattatccgacatccccgcaccggcttgtcccaagaacaacgtatttacaaaaagaatgtaagccattgtcataaacgtagtgagacccgcaacaatctccgttctaacgtttgttccgttttcttttaatttaaagaaacgatccataattactaactcccccttagagatgttgaagccatattgaaaaacgacaaatgaccctgatgaagattcttcacccagggttcagctgacaaggagtggcatgtgcctttactaagaacaaaaaaaattctaatgtgcgtgatgtccccgcaatcatgtagaattcatgtgcttagccttctcctcttcgtagccagatcattagggtgatctcgtagagactcccgggccaatccccaggattatacgaataagtatgcgctatgtgtttgtttcccatcactattttaggagggcagtatgtttttgtcaatgagaaaaacgaatattaatatcacgcttttagaatatcgttcgtattatttaacagattgaaccagttcagcggtttacaacccaattgaatacgcttttttcggtgtaatctcaatgggatatgtccattctttcagactgaaagttccgcagaataacataaaaagctagcctgatcaaagagcagaagcgctctaatcaggctagcttatatttctgatgcgttttagcaatcaggtgtatgatgatataggaataataacgatgtctcgtattccgaagacttatactcattaggtatatggagcaatttgcgacatgttccggagctattttttaccggatcagtcctatgttaattatatctctgtctgcggagcatcctgtatctcttgttgttcctgatttgtgtttgttgttgagtcagaggataactcctggttactggactgatcggaagaagcatccgctgcctctaaattcacaaatggaaagtcccccgaaccggaagccagatcttgcatacctgaaccgcatcctgccagcatcaccatcagaaacgcacttccaatgcccatcttccatttgctcatatagtcggttttacgcatacattcaattctcctttcagtagccatatagctcttagtatgtacttattgtacaggcccgacctgaaaggatcatgaagtcaactttaaaatgggattaattttgaaagtttattacttgtaaaaaaagtagccctacaaaaatttgatcacaatattcttcttaataaaaaaacgcccttttatttgcgaaataccgcagataaaagagcattttttataatctatcgttaagagtctataccctattcccactcgattgttgcaggtggtttggaagttacgtcatagacgatacggtttacgttatcaacttcgttaacgatccgtacggagattttctccagcacatcccaagggatacgtgcccagtccgcagtcataccgtcgatggatgttactgcacgaatacctacggtgtaggaatacgtacgcgcatcacccataacgccgacactcttcatgttaggaagggctgtgaagtactgccagatttcgcggtcaagaccggccttgccaatctcttcacgcaggatgtagtctgaatcacgaacaattttaagtttctcttcagtaacctcacctagaacacggatcgcaagacccggaccagggaacggttgacggtgtacaatttcgtccggcaggccacactcggtacctactttacgtacttcatccttgaacaatgtgctcagtggctcaatcagtttgaagttcatgtcctcaggcagaccgcccacgttgtggtgggatttgatggtctgtgcagtcgctgtaccactttccacgatgtccgtgtacagtgtaccttgcgccaggaatgcaaaatcatcgaactgcttggactcttcatcaaatacgtaaataaactcgttaccgatgattttacgtttttgttctggatcatccacgccagccagcttggacataaagcgctcctgagcatcaattttgacaactttcatgtcgaatttgccgacaaacgtctccattacactttctgcttcgcctttacgcaacagaccgtggtcgataaacatacatgtcagttgatcaccaatggctctgtgaagcaatgcagctacaacggaagaatctacaccgccgctaagcgcacacagtactttactgtcgcccactttttcacgaatgtctttaatcgtgtcatcgatgaatgtctccatcgtccagttgccttcgcaaccacagatttcgaacaggaagttacgaatcatgtcgttaccacgaacagagtgacgtacctcagggtggaactgaacagcatacaatttacgctcatcgtcactcatggcagcgattggcgcactttccgtacctgcatccagtttgaaacctggaggaagtgtaaccacgtggtcaccgtgactcatccatacggtatgttcgccctcaataccttttgccagtgtagatccagcagcaaactcaaggtctgctttaccgtactctcgcttctcggaacgttctactttaccttcgagctgttgggccataagttgcattccgtagcagataccgaagattggcaagccaaggtcatagacacctgggtcaacgtgtggagcattctcagcatatacgctggacggcccacctgaaaatacgattccttttggtgccatttctgcgatcttttccgccggtgtgttatacggcaaaagctcgctgtatacgccaagatcccggattcttctggcgattaactggttgtattggcccccaaagtcaaggacaaccacaatctcattctgcttattcataaccgtgcctccctcaattcaatgaaactaattatacgcaacgacaaaacataccgtcaaggaaaggcgaaactccttttttcgacatatcaaaacaggattaccaaatgcctctaaatatgaaatttcgaacagaaaagcttggcagcaagatgctggttcaagtgtatgatcgtggaaagacgcctcgttcgcagcgcagcgcgaaaggcgtcttatgtatggcatgcagcgatgaaccaaacgcttcatttagataacaatgcgccagcaatggagatcttcatctgcccacaagtggccaagctctattggaaagcgatagcgattgtatggcagctgcttcgaatctttggtgtaacgttgtaacatcctggtgttacaacgcctgcaaacgccgggccaaacgaagtgcccggcgcaggaagttcagactgtccgcgcgcagcggacggtctggcccgtacagcagccgttcccagtcggctgcaaaccgcgcgatgtccgcgccgtccgcgcctgtggccaaagccggtgacgctgcatattcacgcagcgtcatacccggcggccgcgggccgtaccggcgcgcgagcgcggcccagaccggagcggcggcgcgcagcagccgctcgcggtctggaaagctgctgcgtggccacgccagcagcagccctaaccgcagcgcggggcgtagccgccgcatgcggaccagagcagcggcgcccagcagggccgctgccacaagggctgccgcgagccatggctccgcggcaatggcccgtgcacgggcgagcagccatgcgcccgcgtaacccaatccgccgctcatatacggcggattctccgcaacaggctgcgccccggcgagtgctgtggcatctttgcccgcgccttgcgccatggtgaagcccggcgtagcctcaaacggcatccagcctgcacccggaaaatatacctctacccaggaatgtgcatctccctgtgaaatcacatattgactgggcacattcgggtcagcaattccaggcccaaagcctttaacccagcgtgcggggatgccctctgcacgcagcaacacaatcatagctgtggagaaatgattgcaatacccctgccgggtgacgaatagaaaatcgtccacaaaatctgttccacgcggtggcatacgggtatccaacgtatactcggcatgagcagccagataagtcttgacggcctgcacagcgtcataccgggtctcactgccttgaatgatttccttggcaagcgtcttcactcgactagggagtgatgcaggcaattgcagataatccctccgaatggctgccggatctttccctttattcgttttctcaagaagacgtaactgttcaggtgttgcgacaggaaccatgacgtctgccgaataatgtttaactatcttatcgtttccggagctcgcgagccacaatgttgccgaatcgcgattagacagcaaagaaaacatgttttcctgattatccttgttcttatcctggaacgatacgttaaccggtatgcccccggtaaagagaggatttggtcctttccactctcgctgcatcatgacagtttggcgaatgcgactccaataggttggattctcccaaccatcagcacgcagcattccggatggacttgccgtttcgaagctttgacccggatcactccaagtactaccgttataatatgaacgggtctcccctcgccaatacgtcacttttggactcttcgctataaaaaagatggagttgccctgcactaacggtgctcccataggcgcgtcagctgtgctatatcccgtgactgccgttgcagcagggatactactatgctgtgtataacctgcccagcgagctaggcgttcacccatctgctccagagatatgcgttccggttgaggaatggaagcaaactggccaggtaacgcggagagaagcaccatacctgcagaagcaacgatagttactgcactccaacggccataggggctgccgcgataactcggagtcgtgactcctccattgagacgtagtagctgaagcagagcctgaataagaaaagtccataggacagaccgtattacggaagcatacacatccagccccgcaaaggattcaagcaaaagcaaatagagcagcgttgcactgccaaacagcatcacgcttcgacgtaacaatacgagggattgcacagaagccatgagcatgctccagccgcacatcatgaacaaccctctcgtttctgtactaatcgagtggaatcgccagttatttataaacgtgtccatatccgctgaaagtattcccgggtatgcaaccgcccaacggacaggatcacttcctccgtacatcagacatagcgcagtgagcgcaatgaataatcggatcagtactccggtgatccatcctgtacgaattaaccccgcgagcaacaatgctcccgttaatcccgccattacggacaagaaccgctcactgccctgctgatctgatgatgtaaccggatatatccactccagagacagtataagtaaaatggccgaaataaaaattttgtaaaggacaggtacgctaacatatccctcatcctttatgtccgtcacagaattctggttcacagctttatagacggaataggccgattccattctcgtacggtccgttgactctaagttgaccacagtggaatttggttgctggttaacattacgctcccacatccgttacctccacctttcccaatgaagataacgcagcgtctgtaaccacatgaattggcacaccgctgtgacgaagccgctccaagcttaagctgtcataccccaatccattcatcaatctatctgttgatcctaattggttctggtccgcttcagtcaattgcacctctacacgataacccgacccgattgcagttatgatccattcggccagaaccggatccatcttgcctgtgagaaccacaattcgcgacccactcgtcagtccatccagcatctccgttcgaagcgaaacagagcctgattgtgctttggatatttgtgcccccgctaacttgtccagtccatgattctcatcatctgcatggaacggcccatgttgccattgatcttgtgcatcatagctcttatcgccgccttccatccacagatgataaggaatgtcatcccgttcagcggtatgaatccagcgggcagctacacgaaccactcgttcaaaagcaggtgcatccatgttctcccgttgttttacgtcataacccgacgcgccttcatacacaaggatgccgagcgaagccagatccgtggtatcaggcagaaaggtctgaagttttcccgttttggctgtacttttccaatgaactcgtcccagtgggtcaccctgctgatattcacggaactcagggctacggtttccctggctatttcttcgctccgacagagtgccttcaatcatcgctgcgaattctaccgaatcacccttcccccaagctgttgcttgaggaacaacaatcaagggggtacctcccgcggtctctgcggagagggtattccagccaaacatatcaccccagtacaatctgcccgtatcccatctgtagactcctctgcgtaacccagaacattcatattgataggaaaattgtcgccgtgttcccgggaaaatcaatttgcgatgaacacctgcaggtgtgttctcacacagaacgatccataacaatggaatacggcaattgaattccagttcgactagaacccgtacctgctctcctgcctcaatccggttcgtgtgtattttccgacggatgcgaatacgccgtggtccgaacccatggagaaacagacctactgtgaacatcaagaaagctatgacagatagaaacaacgccgctttgcccccatgccactgatacaaggaagcaaaagccaccaccaagacagcactcacaatccgatgtcccagcgcagtcattgcctccgtccccttccctgtgatgccatctgtacaggtaccgggaccgatgacaaagcttcttcaatgacttgtacttgcccccaaacctccgctctgttctgggccttcaattgaatacggtgggaaaggacaggcacagctacctctttcacatcatccggaatgacataactgcgcccttgaagataggcaaatgactgcgccgcagccatccaggccagtgttccacgcggactgatgcccaatctgaccgccggaaggctgcgagaggctacagcaacggccaccagatactgtttgacgaccggatcaacatgtacctgtttgacttcacgctgcatggctacgacctcttcagcaagcagcacagggcgaagttcatcaatcgcttctctaccttgcatgcgggttaacaattccaattcctgttccggatcgggataccccagtccaattctcatgataaatcgatccagctgcgcttcaggcagacggtacgtaccctcgaactgtaacgggttctgtgtcgccagcagaaagaacgggcgtggcaaggcataggttgtgccatcaaccgtaatacgtcgttcctccattgcctccagcagggcagactgagtgcgtggtgaagcgcgatttatttcatcagccaggacaacgttggacatgacaggtccgggccgaaacttgaattcagctgtatgtggatgatagattgaagtgcccgtaacatctgccggcatgacatcggacgtgaattgaatccggcccatggagcagtccagtgcagaagcaacggcacgaaccagcatcgttttcccagtacccggcacatcttccagaagtacatgacctccactgagcattgcagtgaggacataacgaatctctgtttttttgccaataatcacactctcaacacgcttcatgaccctgtttaacaattcaacagcatgttcatgttccattcggatataagacatttctctgatctccttccgttcatcagcattcctgaaccatagtaatctatgattcagtgttgcccggaagtagagagaatagtcctgcaagaatgactttcttcagatcattttatacttaaatatgctattcattgccgaaatggatctggaatcgcccgcctttaccgcccactccgcttcattactggttaaggaattcaccctcaaccccatctgctccagtaactcacgtagcggaacccagatggttccaccctgactctgtactactcccgtttcaattgcccctgttgttgtcagtgttccgctcacactgtctgcatgaatcgttctttccttccatactgctatggctgtccttgtttcagagtcccagcgagtgctgcccccgaattttttcatgaacgtacgtaaaggcaccatgattcgctgaccctccatgcggaactcgcccggttgcaaggtagccgcagccaatcccacctctaccttcagcttcttgcttgcaagccataacgtcgcgttcgcttctacatgctctgcgatccaggcctttcccggcgccttgcgggccttatacttaccatctggatgtacacggaattgaactggttgatccgtactctttatggtgtcaaaacgatatccatgatcccgataatatttgataatacccggaagtgcttttaccgtttcagcatgtgcaccaccgtcatgcatcagtacaatgacggaacgtgctcccgcaggtactttggtggaattgctgaggatctctttggccggaacacctttacgcttggaatccccactatcgacgttccagtccatgacggtgtacccacccaattgcagcaaatcaaaataactctggtcaaaatgcccgtaggtaccgcctggtgctctcaccagattcggacggaaaccagttatacgctccagcacttcctctgtctgcttgatctgtttccagaacactttaaaatcactgtacaactgtttgtattgatgattaaacgtatgattgcccaaagcatgtccatcctccacaagcccccggattaactccggataacgctctgcctgctcacccaacacaaaaaatgtggccaaaaccttctccttgcgcaaaatatccaatacttcacgggtatggttacccggtccatcgtcaaaactcagatagactaccttgtcttgagtattcttatcttccgagatcggatcacctgagccggaagcagaagatgcataagccgtgcctgcatatacagcaaatgcacataacaatatcgcaatacgcacgagaatgacagaccattgtccagctaaaaacgtatgtatggatgttgcagagtttccccctatttccttgattctgaattccggtctctgtaccatttacgaatcgacctccaccgtctctagtaatttgctgatagatttcagcagatttgttagaattatatggaggctacattgaaaaaagacgtgattttgtttaatattttttcacaatttgctatgtagcctgattgattcttcgcttcagattaggtagcataatgaacaggcagaacacattaaaacaccttggagagtattcatgctcccaccccgtattcaggagagtgaaatctattggaattgcttgagaagatccaacatctgtttgggtcctacggatacagcgttttgttttttggcttgttgcttgaattcatcgcacttccctttcctggtgaaacaacgatggcttacgcagggtttctctcctacaaggggcatctcgactttggaatcctcaccatactggcttttctagggacaacgattggcatgacaatcacttattttattggagccaaagcaggactgccctttataacacgatacggaaaatggtttctgctgaagcaggacaagctcgataaaacgcaaaagtggtttgccaagtatggtaatgccttaatcttcatcggttatttcattccgggtgtaaggcatttcaccggatatttcgcgggcatagccgctgttccctttcgtaaattcgctctctacgcctattcaggcgcgttattctgggttgtattgtttctgggcattggcaaaatatttggcccccagtggaacgccgtattccatctcgctcatcaatatgcagcatatatcgtgggaggaatcggcctattgctcatcgtagccgtactctatcgttaccgcaaagcatggacagcaagatccaccgtatccaagccagcccctgttcgacaaagacaaaagtaaattcggacaaaagtccatctataataagcagacaaggagttgcgaataatcgcggctccttttttttgtgataatccgaattcatccaggtcatactaacttgaaaatatagggtgtatagggaggtgaaggtatgagcaactcaacgcaggctcgtcaagatcagaggcaaatctctccggatctaagcgaaaatatggaatactgcaagcaagtgatggggaacagcaacgacttgatgatgcgccctctccagtgtttacataaatggcctgcagttatgttgtacatcgatggattagtggatgtgcagattctgaatcattccatcctggaatccctgttaaagacacatgaacttccggaattctctgcagatgatgagcatctgagctacctccagaatgacattctggctgcgagcaatgtaacatttgtggatgacatggaagatgtgcttaatgctctcctgtccggttcggccatcctgctactcgaaggctgtgcacgaggattgaaaattgccgcagctgggtgggaggaccgtgctgttggtgaacccatctcacagaccgttgttcggggtcctatggagggatttaacgaaaacttgcgtacaaatacatccttgattcgcaaaaggattcgtgaccctcatctctggatcgaagaaaaggagattggtcgtatcaccaaaacaagagttgcggtcttatatctagagcatactgttgatccggaagtggtagaggaactaaggcgcaggctcgatgagatcgatattgacgggattctggagagtgggtacatcgaggaacttgtacaagacgaaaccagaacgttattccccacggtttacaatagtgaacgtccagatacggtttgtgctgctttgcttgagggcagagtggccatcatcgtggacggcacgccttttgtgctgctggttcctgccttgttcgtgcatttcttccaatcgccggaggattactatcaacgggccgatatcagcacattgattcgcttgattcgttatctgtccttttttatcgctttactagctccatcattctatattgccattaccacctttcaccaggaaatgttgcccaccaatatgctcattagtctggcagctcaacgtgaaggcgttccttttcccgcattcattgaagccatactgatggaactgacctatgaaattttgcgagaagcaggtatacgtattccgaaaacggtcggtcaggccgtttccattgtcggaacactggtgattggccaagcagccgtagatgcaggagttgtctccgcagcaatggttattatcgtttccataacggccatatccagttatgtcattccagagaatggactgtctatctctgtccgaattttacgatttgtattgatgatactcgcggcagcttttggattctacggtattctaattgttctgctcattacagttacacacctgtgcagcttgcgttcttttggtgtaccgtatatgtccccctttgcacctctaattcagaaagatctgaaagatacgctgtttcgtgtaccctggtcccatatgaaaacacgtccattctctacgggtaccccgaacaaaatccgacaagccagcaaaaaaatgaagcgttaattcggtaaggagaacaacgtatgaacaagtgcttccgattaattgtatgcattgtattcctgctccctctccttaccggatgctgggatcgccaggaactgaatgaacttggcattatgctgggtcttggtgtagacaaggatggcgatttgattaaagtgagtgctcaggtcgttgtgccaaatgaagtttcctccaagtcagggggaggtaatggcactcctgtcacgctgtacgaagcgtccgcgtccacgctgtttgaagcaattcaaaagctgaccgagacaagcccacgccgcatattcatggcacatatccgtgtactggtgttcggagaagaatatgcacgcaaagagggaatctacgatgtcatagaagcgttaatgcgagaacctactgcccggcccgattattacgtcatggtcgctcggaaaacaacggcttccaaagtactggacacacttactccactggagaatttacctgcagaaaagttgtttaattctctggacgtatctgccaaaacctggtcacctacaacgactgtaactggtgatcagttaatggaatatatgctggctcccgggatacaacccgtaatcaccggtgtagaggtttttggcaattcagagagaagcggaagcaaagacaatattgcgacgatcaagtccacagctcgtctagtttcaacgggattgagtgtcttcaaaaaggacaaactgattggctggttaacggaagatgaatccaaagggtacaactatatccgcgacaatgtcgtatctaccataggtcacttgccttgccgaaaaggaggaaatgtgacttttaaaacccttcgcaccaagactcaacgaaaagcaaaggtcattgatgaccaacctgtgatccacatcaaaataaaaaatgtgtcttccataggtgcagtagagtgtggagtcagaattggttcgatgaaaacactcaaagagttggaaaaggacagtgaggatggactgatagacctgatggaaaaatccgtgaattcagtgcggcgaaagttccatattgacatttttggattcggtcaggaagtgtatcatgccgatcctaaatttttcaaaaagattgagaaggattgggatcaatattttgaaaatttggatgttaagtatgaagccaatgtacagatcaaacgtgtaggtacactggatgattcattcaaggaggatttgaaggagtgagaccggatgttgattacaattactgtcattgtcatagggggcctcgtaggcttgtttgatcttccaggtctcatccgtcgcaaggaatggagggaaacagctgtgtacagcggaatgctcgtcatagccacggggttcagtgtgattgcagctaacctgtgggatttccccagtccgctctatatcatcatgtggatctatgaacctgttaatcaattcctggcacatctgacgggaacctagaaaaaggagaggaccattatgctggaacaggggcgccttggaacaagacaattgaccacgctcatctttatgatggtggtcggggatatgatgctgatctacccctcggtcatcacgtcctatgccaaacaagactcctggatttgtgcttttataggcgttcctctggggatggcactgatggccatgttcctgaagctatgtagcatgcacccagaaaaaaatctggtgcagatggcacgaagcattctagggttctggccaggtactttcttttcctgcctctacctgttctttttcattattggtgcttccacgcatacgagagaagtcggcgatttcatgaccactcaaatcttcccgtacactcccattcgcatcatcattctgatgtttgtcatcgtgatcgcctggggagtgtctcacggattagagacgatggggcgaagcagtgaactactgatgcccgtcgttattgtgtttattgtcgtccttgcagtctgcctgcttcctcagattgatactagaaatttgaagccagtaagtgatacgggtgttgtctctatctcgcaaggcattctggtaagcattatatatccgatcggtgaagtcgttcccatcatgatgatactaccctatgttgccaagcaggctcatcgaacacgggacgtaattattgcagctggtttaggcagcttggtattggcaacgctcgttaccatatctctgctggtcttgggtgcctttcttacgcaacataacatatatgcttcttttgttttgtcccagaaaattagtattgggagcttttttgaacgtattgaagccattatggcttcttcctggctgatctctacgtacttcaaagcgatgatatacttatacgcctttattgttggttgtgcggaactgttcaagcttaagcagtatcagatgctggtactccctgcgtccttacttgtgttcggattagccaatctgatctcaccaagcattacttttatcgtgatcaccattgttccatattgggtagactgggataccacactggggatcattctgccgggctgtcttctgctgatacaattgctcaagtcttacagaaaatcatctgttactccaaacaattcctcacaggaatgagtgctttttttgagggaaggagcctggtgtggatggaaagatggatttcatccatgaatatcatccatgctgaatatagagaaggagaacggtgtctatgttaattaaggagaaaatcaccattaggcaatttgcagtccttacctttctcgtcatgattggggacatgattctactctatccctccgtggttactgcttccggtaaacaggatgcatggatctgttctcttatcggtcaaccgatcggcatacttatcatgtgggtgctatacaaacttcatcagacacaccctgatctttcccttattgaaatctgccaaaaaatacttggccggtgggcagggtctgttttagcagctgcatatctattttatttcgccataggcgctgtcatatgtatccgtgaagtcggtgacttcatgaccacacagatctaccttcagacccccatccgggtcattctaattatccttatgtgcgctctggtctgggggcttatgcatggtttgcatacaataggaggaagcagtgaaatgctgactccaatcgttgttgcatttatgattctattatttctggggctgatgcccaaagtaaacagttcaaatctacagccttacttggacaccccttggcttcatctgatgcagtctgtcattagaggggcattcacttcctttggtgaactaatcgtgatcaccatggttcttccttatgtgatggccgggcctcacatcaaacgtgacatgttactcgctactttatgtggagggctgttactaaccacattgttggtcatttcactgatgatatttggcccctttctgacccaacacgacatctacatctcctacaccctgtcccaaaaaattaatatcggcaactttttcgagcgaattgaggcgttcatggcgactgcttggttaattgctacctatttcaagagtctgctgtatatgttctcctttgtcgttggaacagctcagctatttcggttaaagacatataaacctctcatcctgccatcagcgatgttattattcgcgttagctgtactgatttctcccaatgtcattttctacaccaatacgatcatgcccgcttgggtggattgggatatcacggtaagctttattattccgctattcctactgcttgtgcatcgacttcgttcgggcaagagcaagaacaattcaaccaatcataaacgattgcccacctaaaaaggctgtgttcacggtaaattccgcgaagcacagcctttaatgatgaaacggttaagatgtatttattcacacatgtctagttcattaattacaatgtcttcaaagcctcaagcgcagcctcgatatgtcctttgacccgaaccttggaccagtccttgatcaatttcccttcttcatcaatcagaaaagtggagcgaaccatacccatgtactctttgccatacattttcttcagctgccataccccgtattgctcggctacaacgtgctcttcatccgataacaaagtgaacggaagtccatatttggcaataaacttgtcatgttgtttcatcggatcggtgctgattccgagaatgaccgtgttcagcccttcaaattcagcatgtcgatcccggaaatcacaagcctgttgcgtacaggacgaagtcatatccttggggtaaaaataaagcagtacccgctgtccgcggtaatccgaaagctttaccgattctcccgtactggacggaagttcaaaatccggtgccaattcgcctacaactaacgtcatgtcagttcctccctaatctcccccatgaaatgctatagggcgttattatgaacctgctccgcgataccgcttcacgccaaaattccacaacagcaagcccatggagccaaacaccaatcccatcacaggtgtaagcagcgccatgcgatgcatctcagacctctccaggaacaacgctgcgggatatatccccacgaaggcaaacggaatgatccaggttaacagtacctgaatggcacggttataaatcgttaccgggtagcgtccatatccttgaatgttatacatcaacggcaggatacctgttggcgcgtctgaataaaaggatagtgaagtcaatgtggtgtagatgcccgcatagatcatgactgagctgagtgccaaaataatcaaggcagggatatgccaccactccagcatcagacccatctctgcgccactgaagatcatgatgatcaggccgataaacgaacccacgagtgcaggcggatctacattttcaagcaatatctggaacaggttatgtgcaggacgtgtcaggatccgatccatctcacctttgacgatgtatcgctcactgaatccccacagattgataaaacaactgaagatgccatagggcaccataaaatatccataaacaaagagcacttcactctcactccagccgccaaggttatccgtatggcgaaagaccacaaagataaagatcaggttggttgcctggaacagcagatccgataggatctccacccagaaatcagcacggtacgtgagtcgtgttttcatgtaatttttcaaatattcccagatcagacccatatagtacatatctgttatcccccttgcacgaacagacgcttgcgcgccttacgccagatcaataccatcggaagcagcagtacggcaaaccagaacacctgaataccgagtacactccagatggcggtaccttccactcttccagtgaacacagaaccgggcagatacgtaatggcctgaaaaggcaatactttcatcaccgcagacatccagcctggatacaggctgatcgggatgattagaccggagaacaaatcaaccacgacgcgtttcatacgcatcatgccttcattgttttccacaaagaatgccgccagtcccgttatcacattaatctgggaattaatgaggaaactgaagaacagcatgacgagaaagccaatccacgccgatggcgccgtaggcaattcaaccgggaacagcagaatggcaatgagcatccccggaatcatgagcagcaggaagcggaaaataccttccccaagaccctgcatcattttgaccataacgtaattgatcggcctgatgaattgaatcgcaatggagccatcccgtatatctgcggcaatctcccggtccaggttgttaaagtaaaaggcacgtgccatccaggatacagcgatgtaagtggtcatctgcgctgccgtgaagccgccgagttcaccactgctaccgtaaatagcttgccaggtaaagtaatacacgccgatattcagcgtatatatcaaaatgccggagtaataattcacccggtatgccagcatcgttagaaaacggatgcgcataaaatcaataaatgcactattcatctcaggatacacccaccgcttctttccctgctcccacaatctcgggacgctcggcggaaccggattggtaaatactgcgcacaatctcatccgtgttaatctcaataatctgaatatcggtaatatcagcttgtccaacgacacgtccgagtacatccgaaacattcagttcaagcggaatccatacggatgcggacaattcattctcaaccgtccaacgtacaggcaacgcagcagtccattcctgcatctgactgatgttgtgagctgaaccaaatttgaaacggatctcccgctccttaccccactgggatttgagatgatccagacctccatcataaatgatgttgcctgcatcaagcatgatgacccgggaacacagtgcctcaatgtcctgcaaatcgtgggttgtgagcagaatggtcgttccatactccttgttcatgtctttcaagaaatcccgaatttccgacttcaccacaatatccaaaccaatagttggctcgtccagaaaaacaatactcgggttatgcaataatgctgcaactaactcacagcgcatgcgctgaccgagactgagcttccgtaccggacggcttagcaggtcctgaagctgcaaccgctcaaccagttcatccagccgtttgcggaaatcgacctctccgacacgatatactttgcgcaataaatggaaggattcgataacgccaatatcccaccacaattgactgcgctgaccaaaaacaacaccaatattctgtacaaacttctcccgttcctgatacggaacatatccaccaaccgatatttgccctgaagtaggcaccaaaatgccggtcaacatcttgatcgttgttgatttaccggcaccgttctccccaatatatccgcatatttcgccctgcggaatctgaaatgaaatatcatttacagccaatacctcttggtattgacgtgcaaacaggtcctggaacgcgcccttcagcccacctcggcttttctggacgctaaacgacttgcgcaaatctttgacatcaatcgccagcatgattatacctcacttggattttgttgaaattgcttgtagcccaaaaagaaattataatggtatcagtcaaaattcagcaagctttaaaatagtctggagccgcgtcctgcccttatgttgggaaaagacgtgtacggaaagctccgactagatcttacttgaatactcgaactcgtttttttatttcatctcaaatacaaaggagagctagcatgaccagaaagacgaagagaaccatatggatttctcttgccgccttcgtgttaattattggaggagcagcggcatattatttcggttctattctcaatcagttggacggtttggcaaaggacggcgacgattcaccatttgcaggcatcgaaaatgtggagaaagtaaatacgcctgacccacccaaatgggaaggcacagaaacggtaaatattctcgttatgggtgtcgatgcacgtggattgaaaaaaggtgaagttcctcgctccgacagcatgatggttgtatcgctcgacccactgaccaaaaaaatcaatctgttctccattctgcgcgacacttacgtcaatattgacggatatggcaaggagcggatcaacaccgctatcacccatggccctaatgcagcgatgcaagctgccggcgacctgctcggcattcctgtacagtattatgtgtatacggatttccagggattcatcaaattggtggatgccgttggcggtgttgattttgatgtggagaaagacatgcactatacaagtaaagcagacaataacgaatacgatattgatctcaaaaaaggatatcagcatctggatggcgagacagcgctcatgtacgttcgtttccgtcatgatgcgatgtcggatttcgctcggtccgaacgtcagcgtgaattgctgaaagctgtaacagcgaaaatgcagtcaacaactaccattgccaaactgcctgccattctggaacaggttaatccttacgtagatacaaatctaacactctccgacatgtggaagctgggtggactcggataccagagcagcatgaacggcagtgagcagattccgccaatgaacctgctgaaagaagaacgtacagcaggcggtgcgcaagtattgacggttaccaatgaagagaaattgaagcagcatattcaggatattattcacccgcctgctacaacggatgatagtacaaccagcaccgaagataaaacagccagtggtgacgatcagaagtcagagcaaccggctcagtaatctacacatgcagagggcagccattcgctgccctctcgttgtgcccggctatactattatgagaaaatcatcatatcgaaaggaagttatcttatgaatacatcacgttcccgttccgaacttctatacgcagaagcacttgaacatattgttgggggtgttaacagcccttcacgctcttttaaagccgttggtgggggtgcacctgtatttatgaaaaaagctcaaggggcccacttctgggatgttgatgacaaccgttatattgactatctggccgcttacggtccaattgttacaggacatgctcatccgcatattacacaggccattacggaagcagcggcaaatggcgtgctgtacggtaccccgactgaacttgagatcaagctcgccaaaatgttgaaggaagctatcccttccatggataaagttcgttttgtaaactccggtacggaggcggtcatgactacgattcgggtcgctcgtgcctacaccaaacgcaacaagatcgtaaaattcgccggatgttaccatggtcactccgatctggtgcttgtcgctgccggttcaggcccgtccacgctcggaattcccgacagcgcgggagttccagccagtattgcacaagaagtcattactgttccctacaatgatctggaagccctgaaggatgctttggagcgctggggtgatgatgttgccgcggtcatggttgagccgatcgttgggaacttcggtatggttatgccggagcctggcttcctggaaggtctctgtgccatgacacgggccaacggctccctggttatctatgacgaagtcattacggctttccgtttccattacggttctacacagacatatgccggactcgataaccatgcggagattgaaccggatctgacggctcttggtaaaattattggtggcggcctgccaatcggtgcttacggcggacgcaaacacgttatggagcaggttgctccgcttgggccggcttatcaggcgggaacgatggctggtaaccctgcatccatctcggctggtatcgcatgtctggaggtcctgcaaggcgcgggtgtatacgaagagatggaacgtcttgctatcgacctaacggcaggtctgcaagcttccgctgaccgtcatggcattgcactgacgatcaaccggatccgcggtgcgttctccactcatttctgtgaccatccggttacgaattatgatcatgctcaagacacggatggagagctgtttgcttccttcttccgtcacatgctgaaccgtggcattaacctggctccatccaaatatgaggcctggttcctgaccacggctcatacagacgaggatgttcaggctacattggaagccgcagaagcttccttcaaagcgatggctcaagaataaattagattatttccactcacaatgtagcgtacaagctgcatcgttgatagatagcaactcaaggaaaaggcgtccaacaagtgatcaacttgtgtggacgccttttgttattatatacagacagtggtgagtggccaatacgactagatagatgctgagtgtaacaactatatgcgtattattgtaatggccttgctgttatagctttgtctttatctctgcctgatctgaagtttcaaaatttcctcccggatcttctgtatcccttcttcgattcgctgcttcggcacattggagatgttcaagcgcagcatctgatcctgatgcacctgatatgttccctccggataataccgttctgtcgtatcagcgatgactccgcgcttttgaagccgggacagcagaacacgaagcggcatatcacccgctaaaggtaatacggtatgctcccctcctgttcgaggagcgtccataaatggagcaaagtctggatatgagtccagttgctcatgcaccgtgtgcatccgggcagcatagcggttacgaatcactttcctgtgatgagcaaacattccgctgtggacatagatctccagagcagcttgagacagaacagaagtgtcgatatcgagcatttttttgtaagccccaaaagattgaattagtggtgagggcagaacagctacaccaatgcgcagacctggaaacaaaattttggagtaactcttcagatagatgacccgaccttcggtatcataggaccatagcgggtcctgtttcgtattgtcctccagatcagccagataatcgtcctccaccagatagacatcgtaccgctgagcaagccggatcagtctcttcttgtcagcaacagtcaacgatgtgccaatcggattgtgaaagcgcggcatgacatagaaaaacttaatatcttcctcagcgaactgacgttcaagcgatgcccagtccagcccatccagggcacgtctcacaccggcaatcggcacatttaatccactcagtagcgagggcatattgtgataggtcggtagttcaagcaatacttttctctttccattgggaaaaggcattaatgcaagtacagccagcgcctgttgcacacctgatgtaataaagaactgctctgttctcgcaaacacctgataatccgcaaactgcttctgcaacagcagaattagcgaaggtaatccctgatccgtgccatacataaataactctgcctgcttcttatccatcgccagatccacacagtgacgaaagtctgcataagggaacacccttggatcaggggcagccgaagcgaagtccaacgatccctgccagtccatatcctgagcacctgtcccattctgtacggcataataaccggattgaggtatggcgtacaccaaatgccgctgttccaaccactcatatgcacgaattgctgtgcttacactgcattgatactgttcagctacaactcgaacggctggcaatcgaatgcccttatctgcccactggcgacgatcctgctgctgcatctgttcttgaatccattgctttaatgctcccgcaatcacttcgtattttctcaatgcacccatcctctccaataactgtaccgatacagttaaaccttttatctattgtagcacgatgcacctggcagtatattgaataaggccagcacatacctcgaacctgacataattcgggataatgaaagataaagcactatgactactgtattggaggagcatatatgaacacagcacaaactcggggatacgcttatatcgctgctgtattgtacgcggctattatcggtctatcttttttatttgttaaaatgactgtcactgttgcacatccgattgatgtgcttgcccaccgattcgccctatcgctgatcgttgtcagcattcctgtcatttttggttggatcaagatccgactgagccttcgtgatctgtggcgaatcattccactggggctgttatctcccgtcctattttttgcctttcaagcctttggactcgtatcttccaactcatcggaagccggtattattcaggctatggcccctgtattcacactcgttctggcttcagttttcctgaaggaacgcacatccacgatgcagaagttgttcctgcttctgtctgtcgctggagtggtttttattttcatgatgcaaggaagcggcgtatctatgagtaacctgaagggcattgcattattgctactatccacggtatgttttgcagggtatggtgtgcttgcaagaccattaacccagaagtataaaccaatggaattaacttgggtcacactgatggttggctgtattgtatttaacgccgcttccctgatccgacatgcgtccaacggctccatgatggactatatcaaaccgcttggagatacatcctacctgggtgcactcgcttatctggcgatcctctccaccatgatctccaccctgctcgcgagctatgccctgacccatctggaggcttcgcaaatgagtgtattcagtaatctgtccacgctcatctccatcgtaggaggtgcatggatattgcatgaaccagtgggtagccatcactatattggtgcattgttgattatcgccggtgtgtttggcaccaatatgagcggtcgcaaacataggctggtcagtgggataaaagcatgattccccatattgagacagcgcggaagttggttcgccggttcaacgagttatacgctcccatcctccccaacccccgcattttgactggagagcggctcgggaaacgatcttagaggtaaaagaagccatgggtattcgttatttcgactgacggtatgaagcgctccaatcacgttaacactgctgaggacagtctactgggaaaaggggacccctcagcatgaaacgaacacaaccttcttttttacaagctatgatgttgatcatgttgtccgttggcttgatcagccatgttctgattattcctgcccttttggctgcggccaaaagggattcttggatttccgtcctgttatcagccggaccatttctgatatttgcgctaatgctcgcctatgtctctcgtttcctccaacatcaaaacctgcatgattggttaacctcccgtctcgggaagcccattggcatgttatttcgagttggtaacagtctcttttttctaagcgtaatctttttcacactgcatgataccacggcttgggctaaaacgaactatctgaccgaaacgcccgtgttggtaaccagtattgccctgatgtctctctgtgcctacgctgcgtataaaggtattcgctcgctggcctttaccgcagggttagtcctgccactagttgtcttgttaggtttctatgttgctatcgtaaatacccaatacaaggactacagtcgtctgttgcccgttcttgaacatggatggcatcctattcttaatggcatggtctacagtcttgcaggcatgtttgaactgctgttcatctggtacatccagcctcatctcaccaaacgtatacgtgtatggcagtatctgatgctcgcactcattctcgtaggactgactgtcggcccactcattggggcgattgtggaattcgatccttttgaggctgccaaaatgagatatcccgcctttgaagaatggcgaattgcctctctgggcaaatacattgcccagaccgacttcttttccatctaccaatggctggcaggtgcattcacccgaattagtcttgccatgtatattgtagttgaaatatggaatattaagagctctaccaaaaggcttatcagttgtatctcgttgggtgtcttctttatcctgaccatgttgtatcctatggatgatatgaccttcgaaaagcttctggtcgaatacatatttccgttcaatctcgtgtatctgagcggacttgcgattatcgcgacgacggttgcctttatccattcacgccatcagaggaggaaacatcatggagcatcaagcgattgacaccacgtcccatgaaacactgcttgcctctttgaaagagcaattcaatccatgtgcagatgtcgttattcagacctttcctgttaaagacgaatctgatcagcccgtaattctgctttattgtgacggtctcgtcgacggtaaacaaattaaccaatttatcattccccgtctggaacagcactccctgatcattgaggaatcacatcccaaagaactcggattaacattgaatccgttggatgacctcaaagatactaacaagcttaatatgttgatatttagtggacaactattgatcattttcggtaatggtgtacagtcctgcagtgtagatattgctgatatcccgggacgcagtcccgaagaatcagccattgaaacatcagttaaaggcccgcgcgatggattcaccgaagaactcactaccaacgtgggccttatacgcaaacgaatgaaaacatcttcgatgtgttatgagaaatatgtcaaaggcggacgtactcaaactgccattggacttctatatgtaaaagatattattaatccagacattctaaaagaagcacgacacaatctggatcagattgagatcgatggcattctgggtacctcgatcatggagcgggctgtaatgggaggggttcggagcatctttccgctcacggataacactgaacgtcctgattttgttgtcgattccctgttaaatggacgttttgccgttcttattgaaggctctcctgtagcggtcatcgcgccaactacacttttcaatcaattgaaatctcctgaagacgaaagtacaccctttttcatcgttactttcgaacgaattttgcgtatatccggactgctgattgcctgtttcttcccagccttctatatcggcctgaccagtttcaatgtggaacagatcccactacctctcttggctacaattgctggtactcgaatgggcctgcccatgccggtgacgctggaagcgttcctgatgatctttatgtttgagctattcaacgaagcagggcgtagattaccacgtgcgttggggcaaacggtcagcgttgttggcgggcttattattggggatgccgctattcgtgcagggattacttctcccaccataatagtcacggttgcgatctcggtcatctctagttatattctcgtgaatactgtgctaagcggggctactgcccatgttcggatcgggatgttactcgtctcttccattcttggattattcggttttatgatcggactattcgccctgttggtgcatctcgtatcgttggagtgttatggcgtatcctatctgtcacctgtatctccttacattcccggagacttcactcaggccgtatccatgccaccttccatgaaaagaaccaagcgcccagaagcacttcatacacaggattctacccgccggaggaaacgtccgtgaaacgatgggtatccataagcggccttcttatatgctgcttgatcctgctaacggggtgctgggattccaaagaggtgcaaagtataaacttcattacggcgataggaattgattatgtagacaaccagtatattgcgtatgcccaactgattgacttctccagtattgcaaaacaggaaacaccaacttcccgggagacaagggatatctggattggacggggcgagggtacaacactgagcatggctattaacgacttgtatgaaacgtcacagcagcaaacgctctggactcatgttaaagccattgttttatcgaaaaatgctgtcgacgggaagctggaggatatatttaacacgttgctgcattcaggtcaactgagatatacaccctggatttacgcgacagaacataacattccggacgtgctctccccttctgcgctgctgaaccaatccgcccagaccattgagttatttgagcccatgaggctatacaaacagcattccggttacgaaccaatccggctccatcagcttcttgatggactacgggagccagcttccgttgttcttttaccctctgtttcaacaaggaacgagacttggttcaacggggataaaactcccccccttgttagaatggatggattttatgttatttccaaaggaacaagtcagggtagagttgcaggagcagacgcggacggtacacgatacgtaaattatgagcgcgtacatcagtacccactatacgtatatgggaatggtcgaaagactcctgatttaaccctgatgcttcgtgatcccaagactagaatcaaggcaaggaaacaaggagatggcgtcacatttgatctagttacctcggtcaaaagttccatcaccgaagaccatggagccccgcgcacgcctcaggccatggaacaagaagcggagaaacaaatcgaatcccaaatccgagatacgtttgaaaaaaccaagtcacacaagattgattcatacggtcttgtggaacacttatatcgccacaaccttcccttatggaaacaggaagtctacaaccgggcggacccactccaacgttttaagcttggaaaagtggaggttcacgtggatatccttaatgcgagcacgtataaatacagcgaataaatgaagcaaaagaagccccgtgcctgcattggatgcaaggttacggggcttcttaccatctccaactgctgtcgattggggaagttatcctaatggatacgccatgacactcatcaaagccaattcaggctgggtcgtatccaaacgactgtactggacgataacggggatattgctggaaaccgtaatcgcataaggcacgcccggcggaatagactgctccccggatcgtagcgatgcagtgcgaatatgcttcgtccttctcgctggcacttcagcgaccataccttcgagtggttctctgtcttcaaagtaaatcgtgatgtgcagctccgcatccgtggcactggtgttcagtacacagatgctctcatgactctccaatgtgccccggctctccgggggaatgtaaccatccggaatgacccagtaggtgtgacctgtagctactgaaacgttcttacgggcagatgtgcctgattctgtctggtcaggtgtcattgaaatacctcctccttttttttgcgagtgcaatataggttaaaaatgcgtgggctcgcggggcggtagcttcggcgggcggatcgggctgtgggccgctgttggctcgggaactctattcaattccccctcagcaggggaaatcccgctccaaaggcggacgcttcgctccctctacccgattccgccctcctccgctgctacgctcgcctattttttaaaagtttattgccttcagctattcgctgggcaacttttgctggctcgttacttcgtttaactcgctacagcttttaaaccctgaatagctcgcaaggcagccgctttggcgggcggatcgggctgtgggccgctgttggctcgggatttctattcaattccccctcagcaggggaaatcccgccccaaaggcggatgcttcgctccctctacccgattccgccctcctccgctgctacgctcgctgttttttaaaagattattgccttcgctattcgctgggcaacttttgctggctcgttatttaattaactcgcttaattattaagggcatgaacctaccgcagatacatctgcaacggttgcaattgcaactcgcggatggcttctgctacctgctgggcaaggcgacgggcgcctcgttcctgaaaatgcgtgttatcctccacgcctgatgggaagttcacatactcgcctggcagtacccacataaagtcttccttagtgccttcaacacccgcttgctcgaacagaagacggctgcgctcagccagatcgatcagcggaacatcttcctcttccgccagctcacgcacggcgatgatataatcgccgtgcgtatcggtcaatgtgccatcatccgcaaaatagcgacgatgcaccggggtgatgagcaccggacgagccttggcttcgcgtgcagcatcgatatactttttcaaatattccttatatgttgtgaatgggtccgtcccacgttcagggtccggcttctcatcgttatgtccaaattgaataaacagaaaatcttcaggcttgattcgctccagaatggcgcttaatctgccttcattaataaagctgcgggaacttcgccctgactgggcgtgattatccactgccacatcatgtttgaactgtgctggcaataactggccccaaccgcaatacggatatccactttccggctgatccgttacggttgaatccccggcaagaaatacggtcatggtctgatccgcaagagtaatctccaaagcattaattctcggtgcaggaccggagaatgacagacgaagtctgccaccgcgaacaacaaccgaaaatctaacctctgcgtattgtccgggaagtgtgcgaatggttggcagtacaagcctgccttcaccagctttcacgcgtgtcactgtctcagccaattcatcccctgcaacaagtaatacttggtaggttccgtcgggaacatccacgatgaacgatgctttgagcggaatacagaagcctgaacgcaatcgggcagacatggttgtctgccccgaattgttatgatgttgtttcgtgggattcgacacatcgtcatcactaatgcgatgtttctcatacaccagagatcctgcctcgaatccgtatcctccgcgttcctcatatgcggttgttgcagttactttcagataatcccctgtctcatctgctcttcccgagtctggtccaaagttaaacttccagctggtcacggacactgcctggccctctgccgctgcctccatggcaacggcctgactaccctgagctttattcaaaagcgataacctccttggttaactttcgtaaacgttcattcgggcgaagatacgaggatacagtaatctggcttatcctttcaatccgcttgtgctcatcccttgaacaatttgtttttggaagatgaagaacacagctacaaccggaaccagactgacgatggacatcgcgaacattgcgccccagttggaagcagattcgctatcgaggaacattttcagtgccatcgacacagtgtatttatcaggcgagttcaggtacaataccggaccgagcagatcctcccatctccagtagaaggagaagatggctgcagtcgccagagaagacttgatcagcggcataataatctgaatatacagtctgaatttgttacatccatcgatggttgcagcctcatccagctccttcggaatcgttcgaatgaactgtaccatcaggaagatgaagaacggcattccgaagaatgtagggacaacgattggcaagattgtattcagccagccgagcttcgtgaaaatgatgtactgaggaaccaataccacgtcatgtggcaacatcagtgttaacatcatcaaggaaaaccagaacgtgcgtcccttgaaattcagtctggcaaaaccaaaagcgatcagcgatgacgatattacggcaccgatcgtggaaataaccacgattacaagtgagttggtgatgtaatccataaacggtcttccagctgtgcctttccagccatccacatagttgctccagatccactccgcaggaaacagggtatccgctgtgacgaaaatcgtacggctttccttgaatgaactgaagagcatccataggacgggatagagcatcaggagggcaagagctgcaacgaacaggtgataaatgggccatttcacatttctccaaaccatcgttacttccctccttcagattcgtaaaacacccagtacttggatgttaagaatactgctactgtaagtccaccaatcataagaagcatgatccaggccatcgccgaagcataacccatgttgttaaacataaatgcctgacggaacagatacagggagtacagcatcgtaccatccattggaccgccttcgcctttggagataatataggcaggtacaaacgtcatgaatgctccaatcgtctgcataatcatattgaacaggacgattgggctaagcagtggcaaggtgatgctgaaaaatttccgtataggattcgcgccatccacacctgctgcctcgtacatctcagtagggatatttttgagaccagccaggaagatcagcatggacgaaccaaactgccacacagacagtgagatgagcataacgagggacgcattcgggtcaccaaaccaactgataggcccgatcccaattgccgttagagcactgttgataacaccttcattactgaagaggttacgccacatgatggatacagccacgctaccaccgataatggatggcaggtaatacagtgtccggtacgttccaatcatacgagagccagtgtttaggaccatcgctacgaagagggcaaagatcaaccttaacggtaccccaatgaatacatacagaaacgtcactttgaccgagttccaatatttcgggtcatcaaaaaacattttggtgtagttatcaagcccaatccaccgcggagaagtgaataagttataactcgtgaacgacatatataaggacacaaacatggggatgagtgtgaagcccaggaaaccaataataaacgggcttatgaacgcatatccagttaagtttctacgtaacgatgaatactgcctcaatggaacgaacctccttcatggatcagcttgctccctcatcctggcttcggtcatctggacggggaaaggccctcgcatttgcgagtagccccattcccgaccatccctgaagtgggacgagcaagccatcattcaactgttatttattgttcgcaagtacagattcggcgttcttgcggaatgtctctgctgcttgttcaggtgtaattttgccaaagttcaactcttcaaccacatctgccagggaagagattacttcaggtgaaccaaccggtggcggagaactcattggtgaagccttaggctccatggctgctacgaattcaaagacctgttttgttgcgtcactcagctcaggtgcgatagcttctttgattgctcctgaaattggcacaccgcgctcacctttgatcagtttgttcgcttccacgtcattcacccagaaatcaatgaatttagccgcttcttccttcactttggagttggacgtcacaccccagtacatacttggctgcatatatagtcctttttccatatctggtcctggcattggagcgatttcgagcggacggttcgctacctgttgcaaggctacgaactggttggaccattgccatacgccaattcctttttccttcacgagatccgattcctcaataatgcctttggtttggttggctacatccggcgtaggtgctgcaccttgctcgatcatgcggcgcataagtccgaagaactccacaaacaattggtcatcatcataaccaagacctgttccttccgcattgtaaagcgacaatcctttggtacgcaggaagtagtggaagaaaatatccggagctatccctccatccaaatacaggcctttctctgcggtttgtttacccagtgcttcgtacgattcccaagtcatattgtcagggattgcatccacgcctgcttttttaagcaatgccggatcatattggaagcccagaacgttaacaccggcaggtacaccgtattgtttaccgttaattacacctgtgctgataacattctcggacacatcgtccactttgatctggttgcccagataaggcgctagatcctcaagctgaccattctgtgcatattggctgatgtaggaaatatccatctgaacgatgtcaggcaactgatttgccgctgcttgtggtgcgagctttttccagtagtcatcaaatgaagcatattccacgtcgattttgacattcgggtttttcgatttgtacaggtcgatgaccttctgtgtatattcatgccttgcatccgagccccaccaagcgatccgcagggtaactgagtcatctccagatgctccttcatttcctccacctgagctacatgccgctgtaaacacgagcaaagcagccatcatcaggaatattgcctttttcaccatgccaatctccccttttatgttgatatggttgtgtgaacgagttatcctttttatttctgataacgctttcacaaacttgttaatgtcattttcgcaaatgtacgaccatagttgaatacacaaaaccgtcttgttggttcaaaaaacagaggaggacaacagtccccctctcggcgctgttcgtcctccccagacatgaatcacatgattggtagctcattgttatatgccgatcctgcggaattccgtaggtgtcatcccggtccactttttgaacacctgactgaaatattgtgaattcccgccaaatccgaataattcagcaagctcaaatactttcacatccccgcctctgcgaatatggtcacatgcgcgttcaatgcgcagacgattcacgtaattggagaaattctcgcctgtgacttttttgaaaatcttgcccaggtaatctggattcatatagagcatctgatgagcgactccattgagcgagagatccgcctctccaaaatgacgatccacgatatccatcatcttctccacggctgaagactggcggctgatatggtttttgtaataaccggaagttaatcgggccgcactgcttgcaacaaaagacttcaaaccagataacgtatcgatatgcggcagttctgccatacgctgggtgaactccgttgcctcctctggcggacagacatgaaccatcgcagaatatagctgcactacgtaagagcgagtcacttcaatttccagctgctgacgtgataatagatcaaacagacgctccacctctaccgctgtttcctcggtattgcccgatttgatcaactgacacagttgctcggcatcctgttctacatgcaatccgtcgcattctccggccagtaacagatcattcttcgtaatcagcttgccttcaccgataaagaagcgatggttcagatactgcaacgcctcacgaaacaaccgccgcgactgaatcattcgatctgcttcactcagcgcagcggtcacttccaatttatatagtctggtgaatgcagccctaacctcttcaatactttctttcagtccggccggatcagctgaatccgcgagcagaatgaggagtttgccttcaatggttgtgcttaacaggacatgtgggagcaggtcattggcaatgtttttgatcgcaaataagtggctgtaatcatgttcatccacaattcggaacagcagtaaccgaactgcgttctcttcaagctccagatcaaacagctcctgataatactccagatcaaccggcccataggtgcggttggtcatgaactccagcagaaattgctccttcacatgtggaaggacacgctgcaatcgctgtttcatctcaccggcaacatgctccttcacctgggcatcctgatgttcctgcaacagttcagttaacgcatcatggatctgattctcgttgcagggcttgagcaaataatgcttcacaccatattgcatcgctctgcgggcatattcgaactccttgtagccggataacataatgaaacgtactcccgggtatgcttcagatgccttctctatgagtccgagaccatccagacccggcatggaaatatccgtaataataatatccggtctcgactgcccaattttgtccaatgcttcaatcccgttcctcgccgtacccaccaattccgtacctgctgcggcccaatcgaccacttgggaaatcccctccagaatgacacgttcatcatctacgagcatcactttgtacatcgtcatcgtcctctctgatccaaggtatgctgatcgatactacagttcctgatccgggcttgctgctcatcaccattccaccttcatcgccgaaggtcagtctgattcgttcctggatgttagataacccaatgccctgtcctcttgtctgaatacgtccttcgtgtagctgttccaggaattccggtgtcatccccggaccgtcgtcctcaacttcaataatcaccttatctccatctgctctcgcccggatacgaatccggcaagggtcaatgcttggttcgagtgcataatgtatcgcgttctccaccaacggctgtaatgttaacttcggtatccgcgctgttcctacctctggggcaatctccatatcgaaatccagtctttcctcaaaacgcgtgcgctgaatcgtcacgtaactgcggacaatgtccagctctctttccagcgtaatccacttctcggacatgttcacagagctacgcagcagaaatccgagggcctcaaccatttccgagatctgtcgttgcttctgtactttagccagccagttaatcgattccaacgtgttgtatagaaaatgtggattaatctgcgcctgaagcgctttcaactccgtctcacgaatcaccagttgcttcgcataattctcatcaatcaattcacgtattcgttgaagcatcatcttgaatgtgcgatgcagcagcccaacctcattctgtggagatatcggaacattgccaagggctgcctcctccagcttatccagatcacctttttcgatattacgcatctttttgatcaactgcgcaatcggatgggtaatactgcgagagaatctcgctccaatgataagcgccgccagaaagatcatgatgaagatcaccgtaaccaactgtttgacaaactggatctttttaaacatctggtcaaacggggttgtgtacagataggtccaatccgtataggaagaatgagcacgagctacaaagtgtctcccctgctccaacatggcaattccatagggctgggtacgcttcagttcagactcaatctcggcttcactgactgacgattctgttggatagatcacttcttttccatccgtaatgagtaattgggagtcctcagccggttcttgcatctggtcctgtacaattcggtccagccgtacgcggatgatcagtgtgccgaggtcctccaatgtaaatgctccgccaataaaggatttcacctgtcggaccgacaagagtcgggactgtttatccccactggtatgccaggcattggagcccgagtattgctgtcccagtgcaaccagttccttttgcttcgactccgaaatcccctcccgattgcctgcggccataacgttattatcattatcgataaatagcatggaatagacgtatttctcagaacccgcataagcaaccaatcggttggtaattttcttgcgcagaccatttctctcatatcccgtctcggccttttcaagttgaagcaaatattgttgaagcggctcgtctgacatcaccttgaaggagagattggaaacttcccgtagttgattctcaatgcctactgaagacatattgaggacctgcgaggatttctcatagatctgacggtcatagatactgaacacatatcggagtacggatgcataaaacgtaaagctgattaacatcaacaatccgatgaggagaatcgttttgtgatgaatcggcagtgttgtgaaagcgttcttaattttactcatcctaagcgctcctttggcttgcggagggtgctgtcatgctataggttagtggttttattgtaagttattttcatattcacacatccattggtcatctgacaagatatatttatgcaacaatatagagatgagttttgcacaatgctcaattccaattaaataagaaagttagggaaaaatgaaagccatttctatactacacaaactcttaacaataaaaatgtattatattgtatttaaatgactttttttgtctttagtgtagacatttgttttttattgtactataaataggatagcgctgaaatacagggattataatccatatttttaataaaatggagggtacaatcttgaaattcaaaaaaacaattacttctactttagccgcagcaatgcttgtaggcgccttatctgggccggctactatttttgcaagtcccgctcctacgaaaacagttgtatctgttagttcaacaatcgttcccaacaatttaactacaagatctttccctactgtttcatctaatacagttactataactccaactgctgtaaataatggtgatgtaggagcacaaaatcttatttcaaatgttattaaaaaagcaatcacttctgcccttcgctacggtggagactacctaggtaaattactctcaaaacttagtcctagtgcaggtaattttgtgatcaaatattcaagtaaaattgcagatttactcgattctattacgaactggcaagaaaatattattgcttctgggcttgttagtattggaattccaccagcagaggcttatgaaattgcaacatacattgtttggttagcagggctttaaattaaaggtattttaaaaatacttttacctcaatcagactttattacttgtaatttatcaaaaatcacttttttagcataatcttgaggtagttgaaaaaatatactttacttcttaagaagtaaagtatattttatttttatggcaattaaagcaatttagatactaataattccaaaggaggaaatatgaattctacccatatacttattctctttattttattactttttctttttgtatcactaaatgaagtcattaagtttatagctcgcagagataaagaaacacccccacccgtaaacgtaagactttggcttatccctttattatctctattgatcattgtgcctattgcttttttcacagcattatacagtttgtttttttatacttttggtgaaatgagtaattctttatattttgaacagattggtgatgggattatattttctgtatttattttaattggatttatattcttcgaaacaatcattcatcctattatcattgctgccttgaactatggtgtacaaagacgggtttcagtttatactagaaattctgtcacaataataatagacagtatcattatttattttttggcctcgatctttgaaggggtgtatatccaggatttctggtccgctctatccatttccgttttatatcatattatggaatggatcttcacctggattcaccatctgtacaaaaagcgcaaaagtagtacaaccttataatttcattcagtctgccaagtaaaaatgcctacgccttcctaatcataaaggaaggtgtcggcattctcattttaattagtttcgtatttccaaaccttatttaataaatacgtatatacaatttacggattaacaaaaacagttttcagcttcgctacatattgcacatcaaagccaagaccttcagctaccatggcaagcggtacatatgttttggactctttgcctaccttgttcaggaatgcaggtgtatccacggtaacggatgctccgttgaccttcaccgcattggcaccaatcttcacggcaaccttccggtctccgtatgtaatcgttgcagttgaagttttgttatcccacaccgttgttgcaccgaccgcattcacgatgtcttgaatcgccacaaagtttttgccgttacggataattggtttgtacggtgtattcaatgttttgccactcacgataatgttcattggttcacctgtcgcaggtgcagtcagcttggtgtaatctccccagatcgttttggcaaatacttcggcaatcgctgtatatccgaattgattcgggtggaaatcacgatctttgatcatatgagtcatcgtgccttcaccaccaacaaactccttggccacgtgtgcgactttgacatcggtaccctgagcagtgaattgagctgcaattccatcaatggtctttgtgaagccttgggatgcctccatcaatttggcatagagtgccttgcctgctacttctggcatcggttgatactggtcggcgatgacaattgtagctgtcggattaatttcatggatatcattaatcgttgcacttacattagctgtatatgttgcgagtaattcttttaccttcgcttgcagctcctgatcactcagtttgtctgctgtaccgagaagctcagatacatcatttcccccaatggtgattgcaaccagattcgcctgcgctacactctcccggattgcagcagtattggctccgatctgtcccgctcttggatcaggaagacttggttgaatggcttcagaagtcagcgttttgccatccttaattgcagtagtgaagtttttcaagccactggttttcaatccggcaatcccgtagttgtccacctgtgtacgtccatgcagcaaaccctgctcatgcaaacgttctacataaccataaggcaattcttttgtgttgggctcataacctaccgttatggaatctcccaatgtgacgatgcggaactccttagttacggctactgcatctttcttcgcagtcagcgaagtctcgtttgtacccgctggcaatacaccggttttggtgtcagccgcgtgtgcaggcaatgcagatgatgtaaagagcagcattcctgccaacatgcttaccgttaaaccggcagctgtattttcccatatacgtttacgcttcattcaggtaacactccttctcgcaaatctataataatttacactaatatacgtgttcaaaaaggtcggttttcagtaccgagaagatgggatgaagctagaaatggagtagcggagcgtaggaaaactacgtgagcaaccaaaatgtttccttcggaaacatacttcgtaagcctcccgcttatttcggctgaattccatattcgatgctgatgatgccgttaggcatccttcgtaatcaaaagcggactttttgaacaacctcactaatatatagtacatcggtcattccaatgacataggttggtgttactctattctatcattttaaagtaggtgttgtcctctctactgagagcacacatgaaataacagactccctgaaggggagcctgttatttactaagttcagatatgacgttctgtgattaattaagattgcggcttatctgaatcttcagaatttgaatgacccttgtcgctctccggtttgttcccggtagctcgctccagataccgatcataacgatcatccacttcgcgtgccatcttccggtactttaacgtttcctcgacaattggatcacgttctgtctggattcgcacttcatatttgggaggaatcagctggcgttcacgctgatcggtgtcgccggactcttccatgtccccttccgtcagcatatcactgagccgtcgttccagttctttggattcatccattgttttcgctcctttaattaaagtcatacatgcgttaatcattactattgtactttcacttcgtgtacagaaccatcttccgatcgctgttatccccagatttctttgattcccttttccaaggtagaaatccggtgataaaggcgagcgctccgcttcttcagatgctttctgtcccctccgttaatgtacaattaaaagtaattaaagcatggatgagttgaataaactcactccagaccagttgctttcgcttccttcagcacatccgtcagtgcatcatggattttgccattgctggcaacgacatgattcacagacagttggtaaggcgttccgatggtatcggtcaccttgccaccagattcttcaaccagcagcgcacctgcggcaatatcccacggtttcaatccaacttcggtgtaggcgctgagacgtcctgcggcaacatatgccagatggagggcggcagatccgcctgcacgcaagttacgaacttgcggagcaagcgcctgcacagcggccatattcagtggcaacgcaaaggttgtgtctgccgggaatccaactgcaatcaggctctgagccagttcttgttcaccagatacaagcatccggtttccgtgaacatatgctcctttccctttttccgcaacaaacatttcatcacgggaagggtcgtagatcacgccgacaatgacttcaccattgtgagccaatgcgatggataccgaataaaacgggaatccgtgtacaaagtttgtcgttccgtccacaggatcaacaatccacaggaactcttcttcctcagcctctttcagtgcttttgccgaagcttccggtcccggttcgacgccttcttcacccagaatggcatggtggggaaaatgcgtgagaatcaggcggcggatcatctgctccgctcctttatccacttcggtcaccagatcttggggtgaatatttggtgccaagttcagctaccgtcccaagacggcttttgatccattcgccagctttggaagctgcattaatggcaacggcagtatagcttttgcttgtcacgacataaggtgtcttttccttctcattcaaagcgttcactctactttctatatcaatctacgaaaagttgaaatacttgttaaaagtatacgccccacaggtcataaagtttctcgttgcccaggccccttttggcactacggatgaatgatgacggtagactcgtccacccactccacaccctcttcgtgatagaatgccagcttctgcatcagttgcacaagagcctcatccttgcgtttggcctcaatcatcacgtcaagtcttggggtgtcagctgcgatatgacgcaagaaatcaagcacaggctctacctctacaccatcagcatgacctcgcagatccttctcgctcttcggactggagacatggattttgggtggcaatggctgatcagccggtgaatctgcctgggcaagcggtgactgccaggtctttagaatatcaggccacagatcccatgcctgttctccttcgttgttcacccaatggtgatggatatcaagtaccatgggcaatcccaagcgctggcacacggcaagtgtctcaggcgcattgaacgttttgtcatcattttcgagtgtgagccgctcctgaatatcccgatccagcttcaaaaagttttcttcaaaacgaagcgccgccgaaggcttgtccccgtatgcaccaccaatatgtatattgttcttggcagtggcatttagccccatggcatccagcatccgaacatgatgacgaaggtcgcgaatcgagttgtgcagaacttgctcgcggggggtactaagtacggtaaaatgatccggatgaaaggacacacgcatatgattttccttcacaaaatcaccaatggccgcaaagtcctgcttcagcgccgggaacgggtcccagtcattcaggtcctcgtgtgttgccagtggaatcaatttggaagagaagcgatatacatgaatatggctacccttgttgtgcctgagcaaacgtaatgtattgtgcaggttctcggctgcaatccgttcgagcttgcggatcgccgcttccctgtcatcgattttgttaaaactcgacatggtcatggtccgggaaggcgaggcgttctcaataagcacggacattgccacgtaaccaaagcgtacgagcatgaatctcttcctctctattagggcggagaacccacacggcatattcagccgtcaggatgtaccgtcactgtatataaccaagttttaccctaaaagagtgaccataatcgtattctggcaaatccgtccttccgacccgcacttacagtcaacaactattcctgtgcttgctctccaaagaacatctcatctgcaagggcagtctgaatgcgtgattcttcctcagtcaatttgcggatgagttgcatctccacctcagttacctcttgcccctggaagttgatctctgcaatggaaaccacgatcttgacgatggctacagccacgttatccggtgtgtatgcaatcactttctggccggtaggaaatacccggaagccctgtttgaccattttgccgcgtccgtattcaagcagttcgaacagctcctgctcattcttgaacttgcatacggaattgaattcagtctgaaatcccatgcatatccctcctgatcttgtggtcgcaggctacgcctgtacgccgttctcgtaattcagtgcctgcttgcggttgtaacgctccagtgccagttcaatcatgcgatccagcagttcggcatacgatacacctgtctcacgccaaagaagtggatacatgctgtatggtgtgaaaccaggcatggtgttgacttcattaataagcaaggcgccgtcatttttccgaatgaagaagtcggcgcgtgaaatgccgttaccttcaatcgcacggaacgcctgcaaagctgcctcgcgaatgcgatctgcggcctctgggtccagtggagctggaatcagcatctgtgattgaccatcaatatacttagctgcatagtcataatactcaccggaggatacgatctcacctggaacggaagccatgggctcgtcattgccgaggacgctgacttcaacctcgcgtgcttcaacgaactcctcaatgacaaccttcgtgtcataccgaagtgcaaactcgacagctgtcttcaactcatcgcggttacgtgctttggagatgcctacactggagcccagatttgccggtttgataaaacaaggataccccagctgatcttcgacctgtacgatcatttcgtgctctgtctgcttccattgtgtcgcgttaaaatacgtaaaggcacattggtcaatgccagcctgtgcaaacagctttttcatgaccactttgtccatgccgccagccgaagcgagtacacctgcacctacatatggcatatccgccatctcaaacatgccctgaatggtaccatcctctccaaacgtaccatgcagcagagggaacatcacgtccagcgcttctgctccgccatacaaacggccaaacagggcgttcagtgcatcctgcgttccacccgccgattgctccagcttcaagtcttcaatctgcgcgaacggcgcatgcatgacaggtccttttttccacgtcccctgcttggagatataaaaaggaaccagttcatacttttcataatcaaatgcgtttgttacagcaaacgccgtttgcagcgacacctcatgctcgcccgattttccgccgtacacgacgcctacttttaatttatccatactcatgtgtaccctccgattatctgtgcctgatgctgtcatgcttgcatgctcagcacccttgttattctgcttgcattatctggtcttattttacacggaactggatgtctgcgtcaccgcatcccgaaaatctttcgtcatcaaaattcatctgcaatatgaaaaagccggtataccgtccgctccgtccaagcgtaagaatcccggtaatcccaaaatcggtgacggctactaaccgtatgtgcgttaacaagcggcatgccgcccgcatcaaacgcggtcacaacggtgctgtgctgaaatcgtccatctccatcccaatcgtagagaataacatcgccgagcatcagctgctcaggacgctccacttctgtcgcggtcagaccccagctgctgcctgacaaataacgctccagactgttggaaactgcccaactgtaactccacatttcggagccgttcacataccctttataccaccagccagcttctcttctaccagtatagtggatgggtgcgccccctgcaaagagacattgggacacgtaattggtgcaatctacatcaaattcctcaaatgccggattccccgcattccaccaccgatctgcataggcaaccgccagatctctgcgatatgactgctgccgtgagcttcttccttgacccaacacttcccgattcagcagcggccgattcatcgcctgtacaaaatcagcttgttgaaacggacgtccctccccagcagggcgacgctccggcacttctcgctcgacccgtccaataatccatccaccactctgccgcagaaaggttaaccgctcccgctcaatccggtcctcccggtgggtgatcccgctcttctcgtagaacagtctgctgtacaattgtacatccaccaccgcttcttcctggccatccataagcgtgcgcacaagcttggcgctggtctcgctgcgaagaggcacggcgcgccgcttacgataccattcgtccagccttgccatacgctctccccgttccaccacgaagtcaggatcggtaacgatccgttcgctggtctgtggacggtagtcgatctcacagcgattgtactggttcacgtaagtatataaggcactcttccattcccgttccaagcctatgtccccctttggcatgagttctgtctgaaatatttcattgcgtatataaactcctactattcatatgaaagggtcttcggttgtatgtacacggctcaggagggagatccgaaattcggcaaatacaggtacacaagatatcttattcctgctcgcttcacgaaaacgccttcatcggtccaaaagcttgcttgatcaggcaaaaagacctttacgtacggaggtgaaaacggtatacttaaaactaaagttatgattatgaaattacgtttcatctgatgaaactaacgaacaagaacacggaacgatgaaggcctgttcttcacctaaatgaacgttttcttcatctcaccgacacatcccaaggaggtacatgtatgtcagcaaagaatcatttctccgccgctcgcagtcttgaggttggaggcaagtcttaccgctactacagtctcgatgctcttcaggaaaacggccacggcgatctttccaggcttcctttctccattaaagtgttgcttgaagcagcaattcgtcaattcgacggacgtgctatcaccgaagaacacgtaaaacaactgaccggctgggcagatggccgtgacaataacaaggaaattccattcatccctgcacgtatcgttctgcaggatttcaccggtgtaccggttgtcgttgacctcgctgcaatgcgtgatactgtgaaaaaagcaggcggcgatccaaaacagatcaacccgctcgtaccggtcgatctcgttatcgaccactccgttatggttgatgcttttggtaccaacgatgcacttgattacaatatcaaagttgagtttgagcgtaatgaagagcgttaccgcttcttgcgttgggcgcaaacggcattcaacaacttccgtgcagttccaccatccacagggatcgttcaccaggttaacctggagtatctggcttccgtggcagcaacaaaaaccgtggacggcgaaaccgttgtattcccggattccctcgtaggtacagactcccacaccaccatgatcaacggacttggcgttgttggttggggtgttggtggtattgaggctgaagcaggtatgctgggccaaccgctttattttgtaacaccagacgttatcggtttcaaactgacaggcagcctgagcgaaggcgcaacagcaacggatctggcactgaccgttacccaattgcttcgtaaaaaaggcgttgttggtaaattcgtagagttctacggaccaggtcttgccaacatcggtctggctgaccgtgcaacagtagccaacatggcaccagaatatggcgcaacgatcggtttcttccctgttgatagtgaaacattgaactatctgcgtaacactggccgtcctgacgagcaggtagaattggttgaagcttattacaaagctcaaggtatgttccgtacttcaagcaccgttgatcctgaattcacagatgtgattgaactggatctcggctctgttgtaccaagtcttgcaggaccaaaacgtccacaagatcgcatcgagctcacacaaatgaaagaaagcttcaacagcatcattcgcacacctgtagataaaggcggctacggtttgagcgatgagaaaatcgaacaatccgtacctgtgaagcatccggacggttccaacagtgaactgaaggcaggcgctgttgtaatcgcggcgatcacaagttgtacgaacacttcgaatccaagtgttatggttggagcgggactactggcgaaaaaagcagttgaacgcggcctgaccaaaccaggatatgtgaaaagcagtctgacaccaggttcccttgtggttaccgagtacctggaaaaagcaggtctgatcacgtatctcgacaaactcggattcaacgttgcgggctacggttgtgcaacatgtatcggtaactccggcccactgccggacgaagtgagcgaagctattgctgagaacgatatgaccgtagcggctgtattgtccggtaaccgtaacttcgaaggccgtgtacacgcacaggttaaagccaactacctggcatcaccaccactcgttgtggcatatgcacttgcgggtaccgtaaatattgactttgaaaccgatccaatcggttatgatacgaacaatgagcctgtattcctgaaagacctctggcctacctccgaggaaatcaaggataccatcgctagttccctgaacgctcagatgttccgcaacaagtacgagaatgtatttacagccaatgagcgttggaattcaatttctgtaccagaaggtgaactgtacgagtgggatccgaactccacgtacattcagaatcctccgttcttccaggagcttggcgacaagttgaacgatattgcagatatccgttctgcacgcgttatggcattgcttgcggattccgtaacaacggatcacatctcgccagcaggtaatattgcaccatccagcccggctggactgtacctgaaagaacatggcgtagagcgcaaagacttcaactcctacggttcacgccgtggtaaccatgaagtcatgatgcgtggtacgtttgccaacattcgtattcgtaaccaggtggctcctggtacagaaggcggtatcacgaagtacctgccaacggacgaggaaatgtccatctacgatgcttccatgaagtatcaggatgaaggacagaacctgatcgttatcgcaggtaaagagtatggtacaggaagctcccgtgactgggcggcaaaaggaacattcttgctcggcgtcaaagccgttatcgcagaaagcttcgagcgtattcaccgtagtaacctggtcggcatgggcgtaatgccattgcaattccaggaaggtcacggctggtccagccttggtctgaacggacgtgaaacgtatgacattactggcctcagcaatgatgtgaagccaggacaagagttgaaagttaccgtaactcgtgaagacggtacacagttcgaattccctgtcatcgctcgtctggacagcatggttgacgtggattactaccataacggcggtatcctgcaaactgtattgcgtcaaatgatgaaaaaagcttaattacatgaatcattaatgtgatgaagttatacagaaaagctccctgccacgtgcaatcagcacgtggcgaggagcttttttggctttgttttttataataggaatatgtttaaaaatcaatcttcaaggccaactgccttttaatgcccaatgtgatgtgtggcttgatctaacagttgaattgtgcccatgatcagaaacaaacacgacagagcaattaacgagcctccgacccatctagacatgatcactcgctccgcaacctgtttttccgaagcatccgttaccttgtgtggatacaggagaaacattagccctgcgcaaatgaacagtacagccattataatcaagttcttcccctccttacacgtgactttccttagaatttaactttttcgtcgtcacgcgggattctcctcccaccaaaacctttttcagacccatagccatagtgaaaatgatatatccaatgaagccgccgagtgtattaagcatcagatcatccacatcaaatatgcccatgccagtcactaactgagtcacttcatagcccagactgagcagcagagacagcaagattacctttactccagagaataacttgttgcccgtcaacacagggatgaagatgcccagtgggataaaggccagtatattgcctaccagatggattgcggtgccaggacgatgtaacgacagactgttccagtctcgtgagatttcctggaatggtgtcaggttcacggttcgtgtatggatcagatccggttgttgcaagaacgccatcagtcgatccttcacgatgccaaaatcgaccgggtttcctttgaacaggatcagcttagtcagcagatatacatagataatgaatacggcaatccaaaggatgtaatgtttgcttttcttctggttgttgtgattcatgctgctcctcctcctttgtgttgccctgttatttctttacggtgacgatgacgccatccatgttatcacccgatatttcagtttggccttgctcaggtatgtacacggtcatatcttcggtggcacgataatagcggatatgatacgcctcaccctctacttcaacagtaatgttctctttttcttttaacaattcaaggtactcctccagcaccagattattatcatgcatgacagcactatggggcaggcctacatatcgaaagtgccatggttcatattgaatacctgtaatgcgcactttatcctttgggtaacgcaaaataaatccgtatttccatgcattcttctccagccaggctccctctggtgcttcattcatggcagccaagctggaaccgacatccagggataacccgagattgtgctcactgtgtcccgcaggaagcgcatagtctgaacccttttcccgataaagctcgtcctgcttcgcaaaatccctgtaaccactactgatgagaaaatatcggactccctcttcgcctgctgcttcgaccatcttctgaaactcctgcgccacctggcgggataacatgattttctgatccatgattccatatccacgaagcagctcatcctcatctgccacatatacaatatcggatttaaccccttccgcttcaacggggtattgcttattaaccaataacaagttccccttatgtacctgatcatgaatatttccagtgacggatgccgtataacctgcaggattttcatgcgtattctgaatctcgatgggcaactccttcttctgctgaagccatcctggtgattgtgtaacgatatatccgatcaaaacgatacatattaaaaagccccactttttcatgcttgttcctccttttacctcatacatcaaggatagacaaaacaagttaaagaaaaagcagggcaattttaaagtttttcttaaatttgacgtcgaactttattggaatacgggcaaacgaacttcgaacaacgtccgcaccacatcgctctgggccgagatcgtaccgtcatgttgctccactatattgcgagcgataaacaagccaaggcctgtccccccgtcctgaggggtcctggcacgatctccagtgtaatacatatcgaagatatgcggcaattcctccggacgaatatgtccaccatagttaatcacctgaataatgatctgttctgcatcacgatatccgttaatatccacgtacatgccatccttgccatgtcgtgcagcgttaatcagcagattctcgaacacacgtgccagcaactcgccatcaccggagatggtaaggtcagtgtctatttttagtcgggcgactagttggttcttttcaaatacaggatagagttcttcgttcatctgcttcagcagctcactaagatccagctgtgtcttgtttataggcagcctgccataattcatgcgggtaatttcgaacaaatcatcaatcagcttctccagacgctgtgatttggtgaatgcaatcgacgtaaagtgcctaacctgttcctccgtcagatgatcatccttcatcagcagatccaaatatccaagcactgaggtcagcggtgttcgcaggtcatgcgccagattgacgacaagctggtccttactattttcagcaaaatcccctcgttccactgcttcccgtagcttctcactcgccagattcacatcctctgcaatcgtacctaattcgtccttggatgagatctgtacacgatgctgaaagtctccattcgccaaatgactgatccctgtagaaatatccttgaaatacgtcacgtagggcttggtaaaccagaagaaaaatagaatggcgagcgggataaataagagcagaaaaaaataaatatctccgatacttctcataaaatgacgatattcagcaagcggatcttctaaacggacacccgaataataggcttgtaaaagcttgtaaatgccataggtaattgcaccagaggcaagcatacttaaccctagcaacataatcatggttgtacgaaaacttcttcgtttagtcattaaacgtgtaccccacaccccagatggttttgataaacttgttcttgttcacatcttcccccagttttttgcgcagggtccgaatgtggaccatcacggtattcccactctcgtaataggcttctccccagacctgttcaaaaatattttctgcactgaacacctgcttggggtggctcgcgagcagatacaaaatgtcaaactccttcggtgttagttccactggtttgccgtagagtgtaacgcgatgttgatctggcgtgatgatgagcccacctttctccagaatggacctctgcacaggcgcagactggctaaattggagtgaacgacgtaactgggagttaaccctggcaacaagctccatcggattaaacggtttggtcatataatcgtccgcacccattacaagtcccgtaattttatccatatctgacgttttggcacttaggaaaatgatcggtaaatgatgctgttcccgaattttacgtgtcacctcatacccgtccataccaggcatcataatgtccagaatcgccaaatctatcgcttgggtctgaacagcttgaaccgccgctttcccatcaaaggccttaatggtgtgatatccttctttttgtaaatgtaaagcaaccagatcagcgatctcaacttcatcgtctgcgatcagaatcgtaattcgcttcattgcttattccactcctatgtgtgatgctcaacaatataacatatttgaatccaacagataaaccaatgaaaggaatccatacatatgaaactggagcgtttattagccatcgtagtgttgctaatcaatcgtggacgggtacaagccaaagacttggcagatatgttcgaagtatcgatccggaccatctatcgggacatcgatacattgggtcaagcaggcatccccgtggtgacatatcagggggcaagcggtgggattggtctggcagagggttaccgtctggatcgaaacgtattaacagacaaggacctcgcttccatcgtcactgcactgcgcagtgtatccacttcccatgctaatgcggcgcgtgagcttctggtcgaaaaactcagcagtatcgtacctgaatccaaaaatgacgattttcaggccaataccaaccgattcatcgttgattattcaacctggacgcatcccgaagcactgaaaatcaagcttgaacttatcgaacagggtatggatcaattacgccccgtaacctttacctactgcagtgcggaaggtatccatactcaccgaactgccgaccctcataccatcgtactcaagaagcattcctggtacctgtatgctttttgtcacgagcggaatcaatttcgcatgttcaagcttgtgcgcatgcaagatgtcacgcttgctaatgagcacttcgagcgtaaagtcatcaacccacagcacagaccctggcaacaggaatggagccgtccggacaatcaagctaggttaaccttgaaattccatgctcgcgtccgtcatattgcggaagaatggtttgggatcgagaacgtcatgcctgatgggactgggtattatatcagccaggttgcttttcccgaggatggctggttatatggattcattctgggcttcggcgcggacgttgaagtattggaacctcagcatattcgggatgaaatctgccgtatcgcggagcaaattgtacaaaattatatacctccgactcaaacctgacagacagctgtccagttcctcctcgtatacttcagatatattcaatctgtacatatatgaggaggaattaatcatgaacgtcactgtatgtcaaagctgcggcatgccgctcacaacccctgcccaattcggaacggaagcagatggaagtacaacccgtgagtactgtatctattgttacaaagggggcaagtttgagcagcccggtatgtcacttgaaggcatgacggagatgtgcactaccattctgaaggacgaaggcatggatgaggaatccgctcgttcgatgctgcgcaaccagcttccttttttgaagcgttggcgcacgaatacaacggatcaacatacagaatctctcgctgaaaactctactgtttctgctaatcctggtcagataacaacagatcattcgttctctgcccagcccgttcgttatgtcacgctccctggcaaacgtattgccggcgtatccgcccgcacaaccaacgccattgagatcagtggcaaaggctgtattcagggactctggaacaattattttgcctcagagcacctccctgcacctgaagttgttcgctatggttgttacacggattacaccgatgggataacccgagaatacaccatactggtagggcatgaggtcagtccgaacgaatcattgcctgaaggattggacgacattttactccctcctgcaacttacgccgtattcacttccagaaaaggaccgatggcagaggttgttggcgaagcctggggagccgtgtgggcctgggataaacaaagtgatcgtacgttcaccggggattttgaattatatgatgaacgcagcctgaatcccgaaagtgtacaagtggatatatacatcgctgttcgccaaagtagataaaaccaacacgataccacctcagacagaatcaaagtttcatcgcatctttcttcataatcaagcaagctgccgggttcgctcggcagtttttttgttatatccggaactacattatcccctaaacaacccgaccatggtaccaagttagttagcatgctttgcatcatttaaccagataatatgcctcatatgcgggtaccattgacttccttaaaattgggactattcacataacaaccgattcgatcctcccatatcaaacctttaatattaggtcctttactcctgaatttccctaaaaacgtttacatctccttaaaaccgggtaaaatcactacaatccaattggaattacgctttaaactcttttatttcgtctaacaagtcacatgtacctatatgcgcacctggcatggtaaccagtcgaaatacataattcaaaaaaacgcatcaaaggaggaaccaagatgatccgcatgcctattcagcaaatgatcccgtaccatcaccaatatccgcgcaacacggcgaccactgctcctaaaaaggagaatgagaacactcaaggtctatcctttcatgaaattctgcaacaaaaaatggcgaagaaaaatgcttctccttcccttagataaaaatggacaccggaccgaccctagtcgagtcaggttatcaaccgtctttccgcagcttggcggaagggcggttattggcgttgagccataaacgactgtacagttctcaggcatgtttctataatggtttaaatatctaaaagatccatgacatatacgaactgtaaaaggggacttagcacatgatcaccattggttgttttcacgctcattattccaacatcgccttaattgaagagacgcttgctccttatgaagttgaattggtccattacgtcgatccaggtctggaccgtcttaaacatgacgctgacttttccgaggttgtcgttcgcgagaaggtagcccagacgctccaatggatcgctgagtgtcatgccgatgccattctggtcacctgcaccctgtttgcgacagtactggagcaggaagccacacaggtccctgtgcctgtgatcggcatagatgatccgttattgcaggagatgcggcgagtagcaggagattacataatcgcattcaccaacccggcaaccattgaaggaacgatggcgcgggtgaatcagacattacagcaagaggatgagaatgggcaactacacgttgccaagacatctcagacggaagcggtgtgcatccctgggacatttgagttgattatgcgtggagatcagcaagggtatctcgaagcggtacgagaaggcttacagcagattgctgagcagtacccgggtaaagcggtagtggcggcccaactgtctatggctcccgctgctgcacaggttacagtagatcgcggtattccgatccatagtccgctagcattgcttgcggcgtatttggagaagaatttgggactggctcgacagtagctgctgatttggagtgaaatattacaatcactaaaaacatgtgaaaactactatatcgactccttctgcaaaataaaaatgctctcgaacaagagcatttcaaatggtataatcactttgtacagccaatttgtggtgggaaataggcttgcctccagtgggaggtgatcctatgaacttctcttttaacgacgtaatcgtgttcgcgatgttaattattgcgctcctgacatacatcgatcgtaaaaagaagtgacccgccacaggttgacggcctgacgggtcacttcatctgaacttgctgcactcggaggaatacccaccgcaaatgctgtgcaggagtagccattggcctggctactcttattggtgtttacctacattcattttattaaacatctgctagacaatcaaccataatgctgataaaaagtatcaggaagctgatcaataagatgaagaagacgacatgatagcagtattctctccttcaaacgatgtcagactgcccagcttgcgctgtatcggcgcctaggagcgtgtccgatattcctcggccttttcctgcatcccggcagctacagcctcattctcagacaatcctttatcagcggcaaaggcacgaatgtcctgcgtaatgcgcatgctacagaactttggtccacacatggagcagaaatgagcttctttggctccttctgctggcagcgtctcatcatggtaggacagcgcacgttccgggtccagtgacaggttaaactggtcacgccagcggaattcgaagcgcgctttggacaatgcatcatcgcggcgctgggcacgcggatggcctttcgccagatcggcggcatgagctgcgatcttgtaggcgatgaccccttcccgcacatcatccttgttgggcaggcccaaatgttcttttggcgtaacataacagagcatggacgtgccgaaccagccaatcatggccgcaccaatggcggatgtgatgtgatcgtaacccggggcaatgtcggtcgtcagcggcccaagtgtgtagaacggtgcttctttacagatctccatctgcaagtccacattctctttgatcttatgcatcggcacgtgacccggcccttcgatcatcacctgcacatcgtgcttccacgcgatctgtgtcagttccccaagcgtagccagttccgccatctgtgcttcgtcattggcatcgtagatactacctggacgaagcccatctcccagtgaaaatgccacatcataccttttcataatctcacagatttcttcaaaatgggtgtacaaaaaattctcctgatgatgcgccagacaccatgctgccataatggaaccgccccgagacacaatgcctgtcattcgcttggcggtcatggggatataacgcagcagtacacctgcatgaatcgtaaagtagtccacgccctgctctgcctgctcaatgagtgtgtcacggtacaactcccaggtcagcgcttccgcttcgccattcaccttctccagcgcctgatacagcggcaccgtaccaatcggcacaggtgaattacggatgatccattcccgggtggtatgaatgtttttgcctgtggacagatccatcaccgtatccgatccccagcgtaccgcccaagtcatcttctccacctcttcctcgatggaggaagatacggcagagttgccgatgttggcattgaacttcacgtgaaaatgacgaccgatcaacatcggctcactctccgggtgattgatgttggatggcagaatggcccgtccactcgccagctcctgccttacaaattccggttccacgccttcacgaatggcggcgaattccatctctgccgtaatgactccctgcctcgcgtagtgcatctgggtcacacagcgtcctggctgtgaccgcaagggtttgccacgtaacccgggatactcttcggcgccagctctcttccctccgggcttcagtccgttatcctccggtttaaccgtacggccttgataagcttcaacatcgccacgctctgtgatccagcgagtgcgcagagctggcagacctgcacggatatccgcatgaaattcgggatcggtcatcgggccgctcgtatcgtagacacgcagcggttcgttatgctccaccccttggggagtattcgtgtcatgaagggctatctcacgctccggaacagcaatgtccggccgtgagccctgaatgtagactttgcggctgccgggaaagggctgaacccgtccggccgcccctgtttctttttccacctgctgatcgttatgtccctgctccgtcgcttgttgtcccgtttgatttcctgtactcatgttcgcttgtctcctcctcagtattcgtcgcttgtttggttggaatagtcattagctcaatttcgtacctgtcccaatcatgcgcaatgcagagaagaaagagcgatcctacaccagaccaggggagacacttttcatgtacagataacaacagacggaggctgccacagatcatcgatctatgagacttccctcctcatccaagcccactttcgcaggttagtgaaaaagaagtcaatggagtacgcgctatatcgcctgttccctgtatataaaaaagccggtccccgaaggaaccgacttttatgtccatcaccaataatgcaccttcatgcagctccttaacggagccctacaagggtcacatcatgtggtggttgtggtcatatcgccgattacttccctacgctggtatgatccagatcaggtgcaaagggtccggaatctcatgcgattccgtctcagtccggacaattcggactcccccagtaacgttaataagttgcggcttacataagccgccgttcatattcaatgaagctggctccgttgggccgtccattacagagtagcgcaaccggaacataaaaacaacctttatattccagaacaccaacccaattggagaaaaatcttaactcaacatcaggataacatgagccccatttgcgtagcagcatccttcaacacaggtgcgtattcatgcaatgtctcctgcgagagtcggctgacaggccctgagaccgagagggcagctgcaatattgcctctgcgatccataatcggaacagataccgcggcggctcccggctcacgttcctcataactcgtcgcatatccgttatcccggatatctcccatctgcgccaaatacaccgccggatcaataaacaccggccattccggcccgttcatcagttcttcacgatcctcgtccgtcgcaaacgccatcaggactttgctggaagcgccgacagacagcggtagtctaacaccaacgggagcgactcggcggatcgcctgatcactttgcacagcctgaatccgtatccgttcactgccatcacgcaggtacagactcacggtctcccccaatcgatctctcagtcgctccatcgcaggcagcagcagaatagcgggatcatcactgcgggacatatgagctgacagctcccagattcggatgccaagtcggtacttctctgttgctgcgtcgcgaatcacgaaccctcgatcttccagcgtagccatcaagcggtgcactgtacttttgtgcaggccgatctggctggcaatttcggtgagtcccagatcactgcgtgtggtaaaacataataatatatccagcgcccgttccacagcccggacggttaacttgcgatcttccatggcataatgccctcctcatgtttcatcacatgaaacttggttacataaattatatgagaaacggtctcatctgtaaaccaaaaagagccaaaatcaaaataggccaacgtgtaaatttttcctttttataagacttaatcccctgtaatttacacactaaggtaatgttacccatatatcttaagaactatataacaattacgtaacaaatgccctcaatcaattgactttgactatattggaacatacgataaagatatattacattaagatatcgctctgaagcaggctctgaaatcgacgcaattctcttttcatgtcgttgttatcttcaactgaacttcaaaggaggggcattcatgtatcaatcatcccagagcgaagccccgctgcaaacaaaagtgtccgatctgccctcttccctatcaccgaggctgattcggttcaaacatattatcgtagcgttgctgctctccgttgtattttttctactgttttgttttatcgcattgcatggttatatcgcatgggtattatccaatcctactgtagcgccggtcttctccaatccaatgcaggccaagaacatgaagtacgaagatatcacgttcccggcagcagatggcagccggacgatgcagggatggtatatacctgctgacaatgctgcaagcaaaacgattattttcagtcacggctatggtgccaatcgtgaagaaacatgggtacccatgtatgacctggcacactatgcccatcaacttgggttcaacgtggtcatgttcgattatggcttcgcctcacaggtgaacaaagctgtagccacaggtggcaaagctgagtcacagcaattgctcggtgcgatccagttcgccaagcaacgtggtgcgcaggaactggttgtctggggtttctcgatgggtgccggtacagcgttacaaaccggactgattacgaaggaagtggatgcaatgattctggacagtgcgttcctgctggagccagatacgctgtaccacaacattcacaaccagatcgatctgccacgtcagcctacactggagatcatgaaactgttgttccctgttctgaatggtaccggattacaacagattccataccaggaagtgaaaaaggaagattatccgttcccgattttcttcatccatggtacagaggacgagaaggcgccttatccaattgcggagcaactcgctgccaaccagaccaatccgtactcggatgtatggattgtccaggatgcgcatcatgagttgatcttccgggagcatccaaaggaatatctgcgccgtgtctcaactttcctcagtcatgtaacgaaaacaagcagtgacgatgtgcagaacacgaataatggagaataaccaaatttcaatcattgaattttttccagagccctcaggggctcttttttttgcactcataggacaacaagctcgcggaatatactcttgggacgcatgaacagacggtctgcatgcaatgaatttcatctgaaggaggttcaacatagatgaactggtatgaatatggtcacctgctgcctctgcggacattggaagaaatccgtttctggaaagagcaggagaaagaacatacactcgtcattcgtgccctggttcctgatctggagcccccatacgtcaagctactggaggaatgggaggttacctttgcaaacagtgagcgagtagccaatcagcttttaaaacaactattgcctggaacccatccgcctgctccctacatcgttcgttgtatcgatcaacttgtgttggcagctcggcagcaatcgagagagttcatcaaacagctgtatgttcttctggagcaaagtgctgctgtgcaagctgttccgcttgccaaagtactcattctgcattttatccgcgagtcggagtattttctgggcgtattggatacgcttggccaacctggcatcttgcgtgaaacggattcggaaccgtcactttttctggaaaatgcgctgcatacgtcagggccaggaagcatccatcgccaagcttcagaagccccaacttctccagagggaaatgtaaatgcacctgccggttcagctcatatccaatccgcaaccattcaaccaccttctaccggaacaacacaagccacacccagctctacagcacctcccgtaaaagagaagccggttcccataggaggacacacactgcctcctctcccctatgcgtacaatgcgctggagccacatattgatgagctgacgatgcgtatccatcatgataaacaccatcaatcttatgtggacggactaaatgtagcagagaaaaagctggcggaatcgcgaaaaaagaataactttgaactcatcaaacattgggaacgtgaacttgccttcaacggggcaggccactacctgcatacgatattctggacaattatgaaccctgctggcggtggcaaaccttccggtatgctggcagaacagatcaagcgagatttcgggagttatgaagcgtttaagaatcaattcacagaagccgcgaacaaggtggaaggcagtggctgggcgatgcttgtctggagcccgagagcacatcgtttggagattttgcaggcggaaaaacaccagaacctgtcccagtccgatatcgtaccactcctgccactggatgtgtgggaacatgcctactatctgaaacatcagaatgaacgcaaaaagtatatcgaggattggtggaacgttgtctactggcccgctgtggccgagcgttacgaaacggcacgcaagttgttgtggccgccttattaagcttggggttagatggtttagagaaaaaaagagatatctccagccgaatgactgaacgatatctcttttggtatatacaaaaaagcaagcctcctgtaaaaagagacttgcttgtattttgagagacttcctatttctaaatgttcacttaagaagcacagccctcgcaagccacatagttgtcgccaacctgtttgctaatggagatcagatcgcccagcttgatatcagactcatctgtaaactccagatcggctatacgtgcaacgatcagtgcagcagcctcttccttgcttgttgccatttggctgaactcggatttttcgcctgttgatacaacctcatataaatacgtatatctcaatgtgtccatcctaacactctccttccgaaatcacatcatatcatctctattaaccaattccaagccctagtaaaaagtgttaatcgtaacgtagcttcatctgctcagctatcaggcgtacttcttcagagccaacgctaagcaccctgctggtctccgcctgtggatagcgatcgcgcagtgttcgaaccaaagccgcagtatatgccgcagctgaaggtacacctgccaattcgttcagacttgccatcgtgccaggctgaacatcgggatatccttcactcgccccgcctgctgcatgctgatagaattgtcgcacatctgctgccaattgatcaccctgaccgtccacgatgataaaagccgtaatgatatacgcctttgcctgcctgcgctgggcaataccacagaatttcaatccacctacactgacatcataatctcccgggcaaaaagcaccctgaacctcgccagtttgcgcctgattcgaccacggctttagcgactcggcaataatcgaagccatctcccggaaatcatcatgaatattgatggcatgtccgggattaggcagaatcagcgacacattaactacccctgggttcaagggtactgccgctccaccggaaggccgaacacagaccgctgtcccttggcttctaatctgttccatcgcttctacagcctgtggcaacctgcggtcacgcagacccgctacaaaggcatctgggtgtctccatatatgtgcaactggtagatgccctgccccaacccgcctgcacataacttcttcccaagcaaaagcttcgagtacactgctaccttgtcgcatgagtggtgtctcccagatttgcagacgcattgaagcctgctgatctgcctgtagtcccttttccggctgaaccggttgatctgaatgggaaggtacactcatcgttccattacctccggcttaacgaattcatatgtatccagtatataggaatgacaacgcatatataaataagccggttcccagggaacacggcttatttatatcacatcctatggcttagaaactgctgcttccaaaaccaaaggaacttactcatcaggcttgtccagcgagtggacatacctgatcttaatctttcatcaaagacaagaactccgcacgttgtgccggattctcacggaaagaaccacgtacagcagacgttaccgtcttgcttcccggtttcttcacgccgcgggaacacatgcacaagtgctcgccttccacaacgaccataactccatgaggttcaacggcctctgtcagaatgtcagcgatctgtgaagtaatacgttcctgaacttgcaggcgacgtgttactgcttcgaccagacgagccattttgctcagaccaacgatcttgccgcttggtacatacccaatgtgtaccttgccgaagaacggcgccatgtggtgctcacactgactgtagtagacaatatccttgacgataaccagttcttcatgattctcgtcaaacgtgacaccgagcacatcgcgcgggtctacttcatatccgccaaaaatttcttcatacattcgggtcacacgtgcaggcgtttcaagcagcccttcacgtgtactatcttctccgatcaatttcaggatctgctctacatgatactcgatcttctcccggttgtcggatacttttgaattcaaataatctttaacgccagccactgccaaacgcctcctttcgaaccacaataaggtaagcagttattcacttcactgctattattttcggcggcccgaacttttacgcgcaggatgctgttgcggctgaggcattttcgctcctggctgctgattcttcatcatctgctgggcacgctgcatttgcttgccattcaggttgtagcccatttgcttcgccattttctgaagcatgtccggattgctttgcattttctcaagttgtttacgcaagtagaacaccccgatgaaaaatcccccgaccagaccaacaatcaatgtaataatcggtataacaatatccatctcttagacacctctgtatgcattctaaaaagcctgataatccgtgtcacttcatgatgtttgacacacatgttgcaaacctgacacagagcggatttcctgaaagtatcatagcatttccgcacgccttgagcaaacggattttccagttgaaccgcacacaagctacgtcatgacagcttcaatgaaaacggttgtatgctgagccagatcgatttcaaccacatccagagaataacgcgtacttccgcgtgccaccctgatcacaggtctgccgggcaatccccgatgttgacgcacaatgactccagtctctttggtggacagtcgtaccgctgtaccattgggatacacggatacactcttgttgaactcaatcagaatgtcccgatccagctttgtaccagacaacgccatcatctcttcacaggcctcatgtggcatcaaactgtccttggataaaccattaatgagattatcatagatattagccacactaacgattctcgcaaacagatgaatgtcacttcccttgatccctctcggcatgcctgtaccatctacatgctcatgatgttgcagggctgtatgggcgaccaacagactgaactcccgtttgttcttaatcacttcgaatccacgccatgtgtgatgcagcgaagaatttgcagcagagccactgccaggaggttcccccactttgccaatatcatgcaataatgcccccacagcaaggtccttcagttgattataattgagtcccatattcagtccgatgaccgaagacaacaaacatacattcatcgcatgaacatactgtgcattgtctttggtacgaatatcggtgagctgcacaagcatttcacgtccgttcagtacatcattaagcaacttctctatactgagggcaacttttctcggactccagtctttcccggatcgaatggattcgagtgtgacactcatttcattaattattgcccgtttcgtggtttcatccagaatgtcttctgcatccacatctttatacgcttcatcctggatgtataacatggtcacgccaatacgcttcagcgtattgaccatgtatacggtgagctggactccggcagacagcagtaccgtgccgttactggaatataccgtcttgcccagaagctcccccgcttccacgctctccacgtttacatacttcatgaacgtcccccgctcttacgatagctgctccaatgcgagcaattgctccttggtttgcagaccgcctacataacccaccagggtaccgtctttaccactgatacggtgacagggaataataatcggaatcggattcttgctgatggcgtccagaactgcacgaacagccttgggtctgccgatgatttccgcaacctgttggtgtgatgaggcctctccataagatatatcggacagaacttgccatacttgtagctggaatggtgttccaagccgatcaagctgcaagtcgaacgtttttctctcccctgcaaaatactcctttaactgctttgcagcttcgctgagcttctcttcattcttctcatatcgatactcgccaatccagatgcgggcccattgttgcagatgagcttcgcgtacgtggaaggctccaaaatcaatgtgacacagtccttcatccgtcgcgcataacgtaagagtaccaatcggtgtcagtacctcatcgtagtatacgggcttgccatgaagacccgtaacggctgaaggtttccacgctgcagcttccggtttggcaggctgttcagactgctcactacccggttcaatcccagcttccattttcaaatcctgttgtaacgcacgtaaggcattgttctcgttgttctgttcctctggctgcttctcactcacttgtccagcctgtggctgtttgggtaaggtctcggacgaactcagtcgctcctcggccttctgcagcatgcttagtacgttcccatcttgttcgttagcggcagcttccccaattgctctcatggcgtcttctcctccaattctgcttaacgcccaggctgcggttccccgcaactcggggcgcggatcacgttttagtacttctgtaagtttgggtacagcacttttgtctttgaaattgcccagggcaataacagcgttgcgttgaatcggctttttgccccgccaagcggcggaactctgaccgaaacgttccttgaattcccggttaccgatgtccagcagcggcagcaggagtggcttcacaatctccggatcggggtgaaactcaggatggtgatcccagttcttgccccggttcttcggacagacaatctgacacgtgtcacaaccgtacagacggttgcctattttcagcataaattcttcatccacgaaccctttcgtctgggttacaaaagaaatacagcgctgtgcattcaactgccccggccccactaatgctcctgtaggacaggcatcgatacattttgtacattcaccgcagtcttcggtcacaggtgtgtctggttgaaaaggaatattcgttaccagttctccgagaaaaatccatgaaccaaatttgggtgatataatggcacagtttttggcgctaaaaccaatccccgcacgctgggacaccgcacgatccaccaatgctccggtgtctaccatgctttcgatcatggcttcaggtacgcgttcctttataaaattgaccaacttgtccatcgctgcacgcaggacctgatgataatcctgaccccaagccgaacgggcaaaaatgcctcgatacgcaccaggctccgatttcggcggattcaccattttggatgggtatgccacggctattgcaataagtgaagcgggctcgccatcttttaaggcggggtgcacccttttttcaatatccggctcttcaaaacctgaagcataccctttatcccgcgactgctccagcagcgacttcagggaaacaaagggatcagccgaagcaaaaccgatatcatcaatgcccagtccggggccagctgccttgatctcctgttttaacttttcccatacggaggcatcctgtgctgccccggtctgtacgctcgtcatttctcttccctctcttcttccgacacttattccgtaaatagtgaacgcccgcctcacggtaagaggacaggcgttaatttctgtatatgccttacatacttgatttcaaacggaacgagtctatatggtttaacgcaaaatgcagtctgaagttgttgtcctgtaagcattttacaatttcttcaattcagaaaacggccagaaaataaattcagccttgcctacaatctggtcggatgtaatactgccaaacactcggctatccttacttttgccttcatgacgattatcccccatcacgaagaaatgatccggcgcaagtgtgattgggccaaaatcagggtcctgcacctcaatatcggtatacgtttccgcttgttgctcgccgttcacatatagatggtgatccctaacttcaatggtatctcccggaagtccaacgatccgtttcaccagaaaatccttcttctccacgccttcgcttggatcacgaagtacgatcacatctgatcgggaaggagtacccagatggtatacgattttgttgacgaaaaggcgatctcgctcaaccagtgtcggctgcatggactgtcccttgaccattgacagattaaacacaaacaggttcagcagcatcataattacaaaagcaacaacaatcgttttgacccagtcccacagctcgacaacccaggatttccccggttgttcaggctttgacggttcattatgttgctcggaagtcacatgttccattgaatgattattggaattcaaagggacacctcatttattaaatagttgaattaaacttgtaacatggtgaccatactccctttcagtctacttcatttgggagagtgaaacaattggttatgagcaccaataccttggatatcttgaatataaccgggatagtcgcgttaatttaaatagaattcggagactccgaagtatgttagaaaatgaggaaaccagaggaatatgacgtgaagaacactcatataaatagaaaggcacatccctcacgttcttacacgttaaagagatatgcctaatatgaaatgaacatcttttttttatttctttttaaacatgcaaactaagctttggacaaaatactaagagtctggaaagcgctcataatctgattggcaccgtaacccattgcttcatatagaggcatagctactttgttgtgctcatcacccgccacccatacctggctgactttacgctgctggaaccgttgttccatagcctcgacaagtgttttgccgactccacggcgacgatagtctggatgtaccgcaatacggtagatgcaaccttggttgtgatcaatcgtaccaatcaaagcgccgacgaggtctccctcttcttccgcaaccatgatcaggtcagaatcccatgacaattgacgggcaaacgggcccatcgtgttctcataacactcttccgatagtgcaacctggagaagctccgtcatctggcttgcatcactcaactgaaaggaacgaacgtgcatgtcttaaatctcccttttcgttagcttagatgaggttttttacaaaaagggaatccctttttaccaaaaacccaatgttcatataatgacaaaaaacgagaaaataccgcttcttcgtcaattaaaccatacttttctccataaaacacgcattttcttttgaaagcgcttaattgtaaccgtttacatacgaatattaaacttttcatccatttaaacgcctgaaaacacataaatagttgcataaagggtaaaatatgtttgttatctctggcccatcattagatcaacacctcgggggacttaataaacaaaaatgttgcttaattagctcgaatgcggtttaatattagtggcaagggtattattacatatgtacctgttttcaaaaaaacctaaaatctcaggaggtatttcattatgacttttcaattaccagcacttccttacgctaacgacgcactggaaccacatatcgatgcaaaaacgatggaaatccaccacgatcgccatcacaatacgtatgtaactaacttgaacgcagctctggaaagcgctcctgaactgcaagaaaaaagcttggaagatctgattgctaaccttgacagcgtaccagaaggcatccgcacagcggttcgcaacaatggtggtggacatgctaaccacagcttgttctgggaaatcatcggacctaacggcggcggcgctcctacaggcgatatcgcagcagctatcgatagcgaactgggtggctttgacaaattcaaagaagatttcgctaaagcagctacaactcgcttcggttccggctgggcttggctcgtagttggtaaagatggtaagttgtccatcactagcacacctaaccaagacagccctctcttcgaaggtctgactccggttctgggtctggatgtatgggagcacgcttactacctgaactaccaaaacaaacgtcctgactacatcgccgctttctggaatgtaatcaactgggatgaagtgaacaaacgttacgcttctgcaaaataagacgttttcaccgcaattttgaacaaaccattaaggatttgaaataaatcgctcccttaacattcattattctcctgcctggatgaataaccaatgttaagggggcttttttgggtgatatcctcttcagcaaaattaaaggcgggcgtcccagcttccgcaatacgggtccaccggactgatgccttcaaaaggggtttcccccatcagcttgcttacaacggctcgcaccgtatcctcgctggctgagtatgcattaataaatacctttgctcgtggaacatcatataaatgatacgggttcgcaaaggatacaaacaccgttggcagttcttggataaaccatggcagattctcaatgaagggttcagcccactctagccgaatcgaaggtttgaggctagagcttggcatattcaaggcgtagattacaagatcggtgcgttgacgaactgcctccacactttccatgaacgccgcatgttgctgccgtcccggttcgaataatgtcacctcaaatccctgctctctaagatgcttcgtcattgtatccgcgattgttgaagaatagaagccctcatttttcaatagggaactgttcgattcaactgggacgagtaacacacgcttcgtagagatagggtggagtggcagtatagcgtctatatccttcaccagtgtaaccgctttgtctgccgcctccttcgcccactcccgatgctctgcgcatccaataacggataatgcacccttatgcgggacgagcgcttcacggggctgcttatgaagaccaagcgaggctttcaaagctagaattcgtgtcactgcctcatccaatctctccaacgttaactgtcccgattgaatgccctggtacatataacctatatcttccctgacatctcgtgtaaacaaaaacatgtcacagcccgctgcaatacattgcggaaccgcctgttctctcggtaatgccatcgtaaatccggccatcattgttgaatcggatacaattaggccttggaagccaagctgttcccggagcaatcctaccaatagttccctggatagggttgctggcataatctcttcatcgcgcagcttgggattcagcttttttgaataggcgggaagacgaatatgaccagccataaccgtcttggccccaccttcaatcaaaccctggtatacctgcccaaaggttgcatcccattcctctatggaaagggtgtttaccgatgtcagcagatgttggtcccgatcatcaaccccatctcctggaaagtgcttcaccgaagctgcaagtccatgagcctgcaacgattcagtatacgcctgagacatgacaagtaccgtatcggcgtttgaaccgaaggtgcgggtgttcgtgaccggatttcggaagttcaggtcaatatcaaccacaggagcaaaggaccaattacaccctacagccttgccttcgcgagccgcaatcatgccgagacgccgcgccatctgcggttcacccgtcgctgcaacctgcatgttattcgcaaatacagtgccgtctgtggcaattccgccccctccgttttccagattggctgcgagcagcagtggaatcgttgaccgttcctgaagataacgatggtcagctgcaacggactccttgtcctctggacgaaacataaatccgccaggctgaataccctccaggatgccatccagcatttccttgtggcccgttaccccatgcatgcaaaataactgccccaccttcgcctccaatgtcatcttctcaaaggttctttccacccaatgaatatccacttcatccaaataaaaggggttgccttgtaaaatggtatgattaagcaccaatgacgcctccttctccctcatcaagccgggatttgtctgctgctgtccggcgcaatttaatatcaatcaatatctggtcatagaaaggctccgtcagcttgtatttcaggaaaggcaaagcggcaagaatcataagaacaccgggaattacactgaaaaacaagccgattgaggtcaccgtaccgggagactgtgcctgatttggaacataacctgtcatagccaaagcaaatgctccaagggacccgcccattgcatcggcaaacttggatctaaatgtatttgtcgagaaaatggtagcctctgcccggtctcctgtcctccactcgccatactccaccgtgtcagcaagcatggatgacatggcaattagtgacataccaatcatcaatgttccaaggatggaccatacgaatagcatcgtcactccatgcccaaacaaaaacagcaaaatatatgacagaccaaatccgatgtttccgacaactgccgtattacgcttccctattttcttcatcaccccgatagagaggaaggcccctgccaagataggcacaatgctaaccgctgtataaagggcgattaagttctccttatgaagaacgtatttgaaatagtagatcgaaaaggcactgcgtaggttcatggtcatatcaacaataaagagggatagtaacagcataagcaggggtacattgctgcgcaataaggtccatgcagcagcaattttgaaagtttctttcctaggagtatgaattttttccttaaccgtgaaaaaggtcaaccacatgcacagcatacataccccactaaaaagaagggcaggaacagtccatgatcccgttgccttcaccagcggaatcgttaaagcactggaaactattgcaccaataatcgccattatgcgcggaacgacaacaaccttggttcgttgccgaggatcgtcggtaattacggcggtcatggaccaatatggcacatcgagaaaggtatacgctatgctccatacggcataagtaacaaaggcatagatcagcttgccgtggtcgcccagattaggttgcatgaacaaaaacagcgtcagcaccgtcaaaactaccggagtaaacagcagatagggtctgaacttcccccatcgtgtatgagtattatccataaaaatgccaaacaacgggtcagcaaatgcatcaattattcttacaactaataacaatacaccggcggaagcagccgcaatgcccaaataatccgtataaaacattaacaagtagctgaccgtgagtgtatagagcatattttggccaaggcttcccatcccgaaagaaatggccgtcttcatggataccttcatcgcttattcgcctgcctcttgttcgattagataccaggcttgcagttgttcacgctctaaatcactgacccctagaccttcaagcaaataattgtccgtagaaccgtatacccgaactatttcatcaatggcagcccttaaatattcaggcttaatccccatgaagctttgaatgagggatacatgctcggggttctgtactacttccttgatttgatctatccattttcggttagcttcttgccgatattgagacgacttcatataatcttccataatcgtctcgagaggaacatcaaggagtaggagaatgatagccgaagcgaagccagtgcgatctttgcctgccgtacaatgccaaagtaccggacgcccctcggactgaaggagtgttcgaataagcaaacgatatgcttgtttcgattgttcatccgttacgaattgcttataaatccccaagagagggtcctctgtcaagcggtgattcattagagcaggcagaagctgatccaggctctgtacggcaacagccccgcccaatgccggattgctgaacatctccacaccctcgatcggcgggttaggatgctgctcctgttcttcctttgaacgcaaatcacagataaaagacagccccaaattttgcagatatcgtatatcctccaggctcaaatcagaaatttcgcccgaacgatacaaatggttggtctttaccacttttttaccctgattcacagggtaaccgcctaattctctcaaattaatacgatgcattagatcctgattcatatgttttaataggctcccttcaagtggttaactaatagtaatgatatattaacaggcagttaatacccttaatactaaagagctaatgttaactgcgtattatcgtattattgattatttgtaaaagaaaaatggcatccattaaggatgccaccgatcattgaaaacgtgaattcgattgtaaataagcaataatcatcgcagccatctcatgaagcacccgttctggatcaaccttctgatcaaggtgcagcaactcgccccgcaaagccatgcgctggagggtcgcattcacaacattactgatcattgccgtagccacatctacatcaatttctgggcgaatggagccgtcaagctggccctcctccagccatttgctaaatggggccttgtcctgatgaagatagctacggtatctttgctcaagctctggcgtcgaataattatccttatagcgtgtatcaaaaacggcgataaattgattgcgctgcttgtgttcttcaaaatgcagcagtatgtagtcaaacattgcctgaaatttcattaatccatttaccgttgatggaacgtgatcattcatcgcaaccttaaattgctccagaatgcgaatctggatctcaaaaataatctcatcaatggatttaaagtacttatacaatgttacccggctaatgccacaacgctccacaatgtcctggatggtgacttttgaaaattccatctccatatagaccgcttccgcagccgctatgatctcttcctttcgtttgccgcgatgttcatccaactgttttctccagctatcgttcatgaattcacagccctctctctccatgctaattcatcccgagtctgtcatctgtttggcttctaccctcgcctcggtaattatacactgtctgcattcattaggttcattgtgaccagcatattagataaaagacgtgactgggttgcttgttcatggcgaccaagactccagtacacgtcatacttactacaagggatataaggaacagaataaactcagattctccatcctgctcgttagccccttcccattcagggattcatgtcgtcatagttacctgcaaagtattgactgattagcttcaggaagatattcgggaatgccatcttgtccatatcttccggaccgatccagcggtaggtcaagccatcgcctttacctgtcagtgtcggcgtgctcagcgctaggtcactaacatcagatggtgccaacatctctccatcgttaagcgatgttgagatgttctgcgcattaggcgtgcctggctccgatgaatgcattgtgtctgactcaggtgacacagctgatgatgaagctgcgccctcccttgttgccgcctgtgcatcgtaggcggctctggcttccgctgcgatcagcggaagctcactgctctggtcctgctcggtacacttgtacacctgcaggctccagacaatgtggctgaacacatgctccgcatgggtagccagcccttccgggcgggcagcgaagccttccgcccacagactgccggccaacaatgccatggccggctcatccgccagcggcgccgccttcttgctggctgcggcgggcgccgcgagcacatgcggcagctcccacatgcgggccaataggcccgtgtctgggcgctggcgcacaagcacttggccgcgatgagcaccgcggccctccacaatcgcgaccagccgctgctcagggcgcggcggcttcgccttggtcttgaccggcagcgtaagctctcttccggcgatgcggccggaacattgctccatgaccgggcaagtcaggcagtgcggcgctttgggtgtacataccagcgcaccaagctccatcagcgcctgattgaaatcacgcgcccgcccttccggaatgagctctcctgcgagctcttccatcaacacccgggtgctgcccttcataatgtcctcatcgatgaggaagtatcgggacagtacccgcatgacattgccatctaccgcaggttgcggctgattgaaggcaatgctgagaatggccccggcagtatacgggcccaccccttttaatgcaaagacagcaggcttgtcctgcggcatctcgcctccgtgcagctccatgacttgtctggcggctgcctgaagattacgtgcacgggagtaataaccgagtccctcccaatttttcaagacatcctcttcaggtgcctccgctaacgcctgtacggtcgggaaattcccgatgaaacgattgaaatacggaattaccgtatcgacccgcgtctgctgaagcataatctccgatacccatgtgaaatacggattgttgtggcgacgccacggcaaatcccgtcggttgaccatataccagtccagcaaattcacgctgaaatgttgtttctgttcctgtaaacccatatttccgtcctctcctattgccaagctaactacttttccatctgctccacgatcgcaaaggccgctgccaattccgtctgatgcgtaatactcaaatgaatgtcatattgcttatcatatggcagctgcagacgttcccaggcttgactggacagcgaggccactggacgtcctgtcccatcaggcagcacctcaatgtcagtgaagcccatgacaccaccaataccgcagccaaatgccttagacaccgcttctttcgctgcaaatcgaccggatacaaactccgtcatccgcttccctcgacgaaccgcgatctcccgctctgctggcgttaaaattcgttttatgaaagcttccgcatggcgaccggacagcagcttccgcatacgtccaatctccagcacatcattgcctatgccatatatcatcaatgcttcacccgcttaatcttttatactgtaagaggttattcaaaaagtcccatcttcttggtactgaaaaccgctctttttgaaccttcattgtaaaagatctccattcaatcacatgatccgtaactctccgaacacgtattctattgtagcaggagggacgatcagaagcgagtacctatccgcattaccatatatgctaaaatatgaatcaggaatcgtctgaaattcttaggaggtctgaataatgcccataacttttgaattgcccactgacgtagatgcgatcattcgcggagactttttccctgcacaacaacccgctcaaggtgtcatcgttctgtctcacggatacaaaggcttcaaagactggggcatgttcccctacgcagctgcacagctaagccagacgcatcatgtgctgacctttaatttctctcacaacggtatcggcgaatatctggagcaattctctgaacttgaaaagttcgcagtgaatacctacagccgggagcttgccgatctggccctggtactgaaacatgtggctacacaacctgaactcacaggacttcctgtatacctggttggtcatagccgcggtgcgggcgtaagtctcgtctatgcactggatcatcccgagcaggtggcaggtgtcatctcctggaatggcgtaaccaatctggatctcttcacagcggagcaaaaagaagaaatgcgtacgcatggccgcagccatgtcgttaacggacgaacaggccagcagatgccactggacgtggctattctggaagacctggacaagcatagcgaacgttacgctatcattgaccgcttggcttcttcacctgtacgagtcgcactcattcagggaacagaagatccccagcgtctgcgggacggttctgccgcacttgtacaagcacgccctgatatcccatggcaccagattcctgatgggaaccatacctttaataccgtacatccatttaaagaaaccactccgcaactggagcaagccatcacccaaaccctgcaacagatcaaagaatggaatagctaactcatctttaatatagtagtcacctggatttttgcggtttcttgttccacataacaaaagagtcactgcgtgagcagtgactcttttggcattccctatataacaatcatgctcatccacccgtattagataccaggaatggcattgcgtttgtgatgtgtgcgcgtatagaacgcttcgaggcgctcttgtgcagccggatcaatctgtttgccttcgagatagtcgctgttcgcttcatacgaaattcccagctcatcttcgtccgtctgaccttcccatagccctgccgatggtgctttgtccaaaacagcctgtggaacgttcagatatgctgcaagctggcgtacctgacgtttgttcagggtgctcagtggtgtgatatccacagcgccatcgccccatttggtatagaaacctgtgatggcttcggatgcatgatccgtacctacaacgagcaggttttcttcaaacgaaagcgcatattgcataaccatacgagttctcgctttgacattacctttgccttggtgagtcatatgacgtgggctgcccaaggatttgaaaccttgctccacttccagcgcaatctcgttcactgcatcttcgatattggtttccacgacatgcttcagatcgtatgctttggctacagcgtagctgtggtcgatatcggattgttcaccataaggttggaacacaccaagcgttttgtactcttggttgttctcttgcgtgagctcgtccgtcgctcttttgcaaagcgccgtagccactgcactgtcaataccgccgctgatcgcaatcagcaaacccttggcacccgcatttttcacatacgtcttcagaaaatcaacacgcttgcgtacttcctcttcttcattaatgcttggtttaaccttcaattcagcgatgatctgttgttgcaaactcatcgttcacacaccccgtttctaaatgaatgaaatttgatgtccagcttgaaaggtccgaatggatcaataaccttatctatccaaaatgaaacgccccggcatcggtgatccgaagggcggggcgttctattggagcgaattaacggcagtaacggtcaaatgcacttttgagatcagccgcaatatcctctgcagaacggtcttccacttgatgacgctcgataaagtgaacgagttctccgtctttcatcagagcgatggacggtgaagatggaggatacggtgcaaagaattcacgtgcttttgcagttgcttctttgtcctgaccagcaaatacagtgtacagatgatccggtgtaatatcgtgctgcagtgcttgggacacacctgggcgacattgacctgcggcacatccgcatacagagttaatgacaaccagcgctgttccttttgcatccggaagacttgcttccacttcttcaggagtacgcaactcctggattcctagacgagttaaatcatcccgcatcggttgaaccatatctttcatgtattgatcaaatgacatcgacattcggtttcactccttataaatagttgttctatgatctcgatagaattaaaggccaataaactctccaaaacaacgttacattcatatcgaacattatggatgtaatgatgtgctattcctattatacatccataagcaatgaaagcaagattcagaaaccgcctgcggaaaggcttcttccataatattatgtctcaatgtctggcaaaatatgctgaatgactaacgttcaaatgccactttgaaggttgtgccctggccttcctccgattccacagtaatggttccattatgtcgttccacaatactcaggcacatggacaatccaagtccggttcccttggcttttgtcgtatagaaaggttcaaacagcttttccttcttcacactgggtagaccaggtcctgtgtcacgtacacacagttccaccttatcatccactatccgcgtctccagcgtaagcacacccttctcattcatggcttccatcccgttacgggccaggttcaacaccacctgtttgatttccttagaattgagatgcagctttggcacattatgggccaacatgagttcaatactctgaccacgcaggttcgcatccgcccataacaacggactgagttcatggatgatgtcgtgcagctgggattcttctttctcggcaatacgattctgagccaaagacaagaaatcattaatgatactgttggctcggtccagctcttccagaacgatccggtaatagtgatcgagggaatcaggactcttttcctgcatgagttgaagaaaaccccgcacaaccgccattggattacgcacctcatgcgtaatgcttgcagccatctgccccaccagactgagacgatccacattatccagttcacttcgcaacatctcaagctccgtgatatcctggatgatcagcatggctcctgtaacttctctcgcagactctgttgaaaaggcataaatcggtaccgttcgggattgaaatacgtatgcaccgtaacgaacggtcaacccactaatctcaccatgaacgacggctctgcgaatgcttttatccatcttgtccgcctgaccttgttcaacaaattgactggcaggctgtccaatgagatcaggcgtggaggtacaaggtagttgctcccttgccgtttgctccatcatctcattgacaaacatcactgtgccttgtttatctacggtagcaatggagagaggcactgcgttcagaatctgatgaagtttctccgtttcggctatgtatcggtgatggacttccgagagatgctgctccagcccgcgatagtgcttcatccgttccagccatagcagactcagactacccgcaacaatggctccagcggtatatccaagtgctgtaagtatcatgtaggtcgcagagtaagtggattcattctggagggatgcgatccataacagactcgttacaaccagttccattgtaatcaggatgatgaggatcgccattttgcgtgaaggtgtattatgcttgaatcgtttggcagacaaccatacaataggatagagaagaatgcccgtatgaaggagaaatccgtacagatcatagggatgcgcaaaaagaaaatagaagagaatatgtagaatggacagcgttacgcctatagcggacttacaatacaaaataacaagtatcacaggtacgatgcttaatgatataggtacggccatcgggcttgcatagagcgcaaacagcagacacaataacatgctcgcgacacttgtcacagcaaaactggtatgaacgattccggcatgttccattctggcaataacccgcttggagagtgccagacggaataagggaatcagaaataccgccgaccctgccagcagtacttgtaaaagcatgtcctttaacgcaaccacaatgccatctcctcctctgcctgcacattccctcatgtatttctgattaaaacataggcgacagtatattacaatatatcccttaagactgcacaatagaactgctcataactccattatatttcagaaaaagccaggagtagacacattttacgtaaaacagacaaaatcaatgaaaaaagagggtaataacatatgtatgatgtcattgtaattggtggtggatctgcgggcctgatggcttgcgttgctgctgccgagcatggagcctccgtgcttctgctggataaaggagatcaactgggtcgtaaactcggcatctctggcggaggtcgatgcaatgtaaccaatgccaaggaaacggatgaactcatccgacatattccgggtaatggacgctttttatatagttcgtttcaaaatttggacaaccagggaatcatgcgtttcttcgagaatctcggaattgccctgaaagaagaagacaacggcagaatgttccctgtaaccgataaagcgaaaacagtcgtggatgcgctggtaggcaaaattgtctccctcggcgttgagattcgcaccaaagaaccggtcaaggaaattattcagaacggtcagcagatacagggtgttaaattgatatccggtaaaaccattcttgggcgctctgtcatcatcgctaccggtggcaaatccgtaccccaaaccggatcaaccggagacggttatccttgggctgaggctgcgggccacacgataacggagttatatccgaccgaagtacccattgtgtctggagagagttggattcagtccaaagaactgcaaggtttgtctttgagggatatcgctctatccgtagtggatgccaaaggaaaaacagtcatctcccatcgcggggatatgatcttcacgcattttggagtgtccggacccgtcgcactgcgttgcagccaatttatccgcaaggttcagatgaagtctggaaacccacaggtcattatgagcattgatttgttcccggagctgtccccaggtgcattggaagcacaggtgcaacaggtattggaacaagaatcccgtaaggctgtcaaaaacattttaaaaacatgggttcctgaacgtatgattcccttaatgatgaaacgggcagagatcagcgatgacctcacgttccaccatttccccaaaggtatgttaagcaacttgtgtgggctaatgaaagcttttaccttccgtgcagacggaacgagatcgctcaaagaagcctttgttactgggggaggaatccacttaaaggagatatacccaaaaacaatggaatccaagctgctgcctggactattcttttgcggtgaagttttggatattcacggctacaccggagggtataatatcactgctgctttctccacagggtacacggctggtatgcatgcggctgaatataaacacgttacatcataataggtattacaccttttaacccgataatgaattagctcagatgccaaaaaccccgatatccactattgtggacgatcggggtttttgggcattgttccattttagaaaaattggctccaactgctcttagcttgtgatgcttctatgctttcacactgcctgaaaatccatcagccgaatcatcgtatgttgggtcatcgctatagttatgtctgccttgctccgtctggcttccctggttttggctcgcataaccctcatgccagtcttcattcacgagatgagccggaatcgatatattctgaaactgatccagctcttccgtttgtgaggcaaatacggcacttcctccatgagattgtacaatctctacggcagactgaggatcttggcgatctgtggggatgtacagttccagcgggccggattgatacggcttatatcccaattcctccaaggttgccctggcggcattcaacgctgaatcgtctgagaagtgcacctgtagttcgctattattcatcatcatctcttcctccttgctacagctaatctctcatcatccatagatgagagattattcttctatagcatggtcagttatagcgcacgatatgctccgaattagaaaggaattcctttagggcgtgtctgaaaactccgaaggaagcagattttgccgaattttcgttccgagcaaggaagttttccgcaggcgtgccggggcacgtcaagggaaagtgacacagcatggggcgaaaaggcggtaaaagatgaacttcagcgagtttttgagacacgtcctaggcccgggtcagccggacccatccggcaatagataagacacagagtccgaaggccaccgcacctgcagctgtcagaataccgacgatccagccgagccaggccaaccccagcgtgaatcccataagaataccaatcgggatgaacaacatccgaaccatcattgaacctgcaagatgcagcgcctccgtgtcatacgttataagctgaacatagtcggacgtggcaaaaacatcccaggaacgataaaacatcaccgtcaacatgatgattaataacgcacacacaatgacattgaccggaaaaggtggtaatgcaactgctgcgatggatagtccgccaagctgcagatacaatttcatcgtggccgagttcctgaaaaatgccttgaatgcaatctccgctgtccgattcgcgatggaacgattacgtaacagtttacgcggtttacggaagatgatggaccgtgttcgtggggcttttggcttgctcaccgcccggcttaacattagagctgtaagctgcagcctgctccgcagatcctcccgcacatccccttcaaacgttcccttcatcaatagcctcatctgtccaactgtaattagaagaagcatgataattccgattccaaaactgattttccacgtctgtccatgcatccatgatgtcgcatgaatggtcatgtaacctatgccaatgacgagagggatcatctgaatccagcgtcgccatccagtatgtcgaaccttcgtcatatgtagtgttatggcttggaatgaagctaccgcaccaaaccagacagccataagtgcaatctggagattcgacatctcatagacacgggaccacaggggtgcggtcagcgctgtaatcaggatcattttgcccagatgttgcagacaggaccggtagagcccttgcctcattagcgttcgcatccacaacggtcttgatttcaaaaacaatacatccgcttcctccacaaatatcaacacaccaccggtaagcataaccacgtcgatcagcccagtcagtacggggagcggtaatcctgtcgcccatgcaggcagcggtttggtccacagactcgtgtaccatccaatcagatagagcagacccggaacaagcaggtatacccacactgtccaatccacgacgagtctgagatttttcatctgttccttgaaatgctctttgcgtcttcgtctgtataaacgaagtggggtataacgctgggaagtttccattctctctcaccctctctctatctaagacgtcagtacatcaaaacagtcaaacaaagaggcttccgacaatcctgccacttcacggatctcatccaatgttccctcggcagcagatctgcccgaagcaatcagaataaaccggtcgcagattcgttcagcggtatccagtacatgcgtagacataagcacacccgcgccgcggcgacgttcatcatcaagtaattttagaaaatccttggttgcacgagggtccagtccaatgaacggctcgtccacaatataaatatccggcgaagacagaaatccgatcatcaacatcattttctgccgcatgccctttgagaaactggctggaagatcattccgaacgtggtccataccgaaacgaatcaacagttcctccgctctggcaacaaaagtttcttcctccatttcatacgccgctgccgccagatcaagatgttcccatagggtcatatattcataaaaaaccggttgctccgggatataggcataacgaccatctcccccaatcgtcacttcatagttcgcatgttccagcagaccaagaagcgttttgattgtggtacttttgcccgcaccattgggtccgataatacctaccagctctcctcgccccacattcattcgaatattgcgtatggttgattgtcccggctcgtatcctgcctctgtaatatgtacgtccaatatggactcctgtatagttgtaccttcatgctctatcttcatatcgaacactcctgttctgattcgggcttgaactaaagactatttacacttgccactccgatgacagaacaaccttccgatcactgttatcccccgattttttgaatcaatatcacaaatgttaaaatcgggggataaaggcgaacgcttcgcttcttcaggttctttctgtcctctacgttatcgtgtaaatatatatttcgggatgcgtgtttgattatttgaacgttgttcttttcttaaaaaaataaagcaataaatcatagtaatgaatgacttattgcttactattatatttcattttcagtaacacagtatgtacgaataattgagactagttgttcaaatgtgaacttgtggttcaccatatcaacagtaaagtcctcagcaaaagtttgatccatcttaagatacacattgttataacgtagaaagattaccaatgcggtaaaagccgttcttttattagcattatgaaaaggatgattttgacccaaagattgaaagatcgcagcagattcaagcagaccagaatctttaactccaatctgctctccaggactgtaacgctaaatcatagcgacgttgatcgcaataacctcttgaatactcaaataccgggtcatgctcatctatccttgagacctttcagggtttgatcatattcacccatcacatcagccaatgtatccataaaatcactactgattccgttaggcaaattaacttttgtagcctttttaataataatctccccgttagactgatttacctcgatttgaaccatatcgccttgctcaagaccaatttgtttgaaggcatctggcattgttaatccaagactattaccgaatttcgttacttttcgttccatcttactcaccctattcattcattactacctctagtaatactatttaattgttataacaataatagtggaacttttatcaatttgtatattatttcgaattttgaaatgcaaaaaaagaagcaggggttccggagcccctgcttcttcatattaaagtgaaaatctcatattaccgatttgtctccaccctagatgtagttgcactctctgcatccgcatccacgttcagatccagtgctccgcggctttcgctcgcatagctgctgttcacgttacgctcgctgtctttcacgctgttgttgcgttcagattgagtccaagtcgcactctctccttctgcattcgcgttcagacccagatccagcgctccacggctttcgctcgcagtgctactgtttacgttacgctcacggtcattcacgctattgttgcgttcggattgagtcatcgttgcaccctctccttctgctttcgcgttcagacccagatctagtgctccacggctttcactcgcatagctactgttcgtgttacgctcgccgtctttcacgctgttagtgcgttcagattgagccatcgttgcactctctcctcctgcttttgcgttaagatctagatccattgctccacggctttcgctcgcatagctactgttcgtgttacgctcgccgtctttcacgctgttagtgcgttcagattgagtcatcgttgcaccctctccttctgcattcgcgttaagacctagatccagtgctccacggctttcgcttgcatagctgctgttcacggtacgctcgccgtctttcacgctgttagtgcgttcagattgagccatcgttgcactctctccttctgcttttgcgttaagacctagatccagtgctccacggctttcgctcgcagtgctactgtttacgttacgctcacggtcattcacgctattgttgcgttcggattgtgtccatgtcgcactctctccttctgctttcgcgttcagacccagatctagtacaccgcggctttcgctcgcatagctgctgttcacggtacgctcattgtctttcacgctactgttacgttcagattgagtccacgttgcactctccccttcggcttttgcgttcagacccagatccaatgcgccgcggctttcgctcgcagtgctactgtttacgttacgctcacggtcattcacgctgttgtcgcgttcggattgagtcatcgttgcaccctctccttctgcattcgcgttcagatccagatccagtgcgccacggctttcgctcgcatagctactgttcatattacgctcgccgtctttcacgctgttagtgcgttcggattgagccatcgttgcactctctccttctgctttcgcgttcagacccagatctagtacaccgcggctttcgctcgcatagccgctgttcgtgttacgctctctgtctttcacgctgttgttgcgttcagtttgagctactgtagcactctcaccttctgcttttgcgttcagatccagatccagcgctccacggctttcactcgcatagctgctgtttacgttccgttcatcgccgcctcttgaatagtcgctcatcgttgtaccttctcccgacacattggcattcaggccaaggcccagcttgccagagctgttacgctcaactgtgtggtcggaagaacgatcattgtaacggttcatactctcggaagataagccggcgttaaggccaagatccagattcaatgctccagttgcactggatgaacctccgtagctaccattgttaccgtaacctgtgtcacggtgtcctgacagaagagatcccagttccaggcgcaaacctgcatttagatccagattgccactgctgttattgctatagctatctgcgtaagttgcctgcgaagctcccagcaatccagctaccaacgtacccgacaataccgacaattttacccaacgattcacttttttcatgattatacactccttctcaattttggttgaattaacgccattgttgcctatgagaaagaggtatattgcggcggccgcccaggtggtgcctgtgaccattgactgaacccattgagccgttccattcggaaagcaaaatcgtaatctggcgtaaccagacccgttgttgctcccggaagtgcagcggctggagccgttgcaccacctccagttacaccggacgaaccggagcttgtcccggcggaagcattagctgctccgggagaagttgctgcaacagaccaactggttggtcgttctgtgcgaggttgcaatggagatgcatcatcatcatcatctggtttcagattggcttccaggttactctgcacttgttcagtgacagatggtttagcagttgtctgatctacgaggaataactcgttgtctggcaaacctgcactaacatcggagtcctgcgtcagatcggttccttccacagacaatgcctgcgggacagcaggttgttctggacgtacttctggttccgtggtgacctccaccactttgcccgtaacctgtactgcgtcctgtccttcctcgttgttctgtggtgaaacaggatctgcgagtgcactcgtattggaagtttcaacattcggtgttttgacgagcgtcggcttttccggagtgactacaggcggttccggcttcacacttggaatctccaccttttcctgatcaggattgagctcagcggatacgtctacaactggaacttctgcttccacagatggcagctggacatttcccttactcagatccacacgggatgaagagatattgaccgaagtaacttcaggtacatccaccttcacggaaggtaattcaaccttgccctgccaaagatctgttttcacagcagacgtctctgccttgatcacctcgggtacctctgcggtaacgccaggcaaggaagctgtaccttcgttgaggttcacctgactgcttgatacatcggctttgatcaccggtgtatccgcctgtacagacggcagttcgacggttcccttcttcgcatcaatcccaatctctgatgttccggccgatccaagcggtgtatctactttcagctcagatacactcagcttacctgtcgattcattcgctttgatcgacggaacttcaacatccagcagtggtgtggataccgatactgacggagtcaggttcaacccgccatccgaatcacgtgaaaacaaactgagcgacaatccgctggaaggtttttcagaagatacctgagcctcgtctgcgtatacatgtgacgatccaaaccccagcatcaaagtcccggcgagtatagccagtggtatgcttccaagacgcacaatcgattttggtaactttacattcaagttgcttcaccccctttccgctaatgcgttggtgggacaaggcatatgagttttcccctaggaataattagaatacagggatttctgcctgttcctcattaaacgtgaaggcgtttactcaaacgctttttaatcataaacttaaaatttgaagtaaattcaaaccttcatttcaactattctaacctgagcagatttcggcctgttttcagtcgcctgcaatcattgttttggctgcaatggagccattcaaattggctttttccccgctacgtttcatcaaataaatcaacccaagcagggtcagcaaaatgcctgaacagacaaaagccggcactacaccaaatgaggtgaccataaatccgcctaccaccgggcccataatattactggctgtcatcacgctgcctaccgttccaaacaccctgcctgtcatcgcctcaggtgtctgttcctgcaacaggatctgaaagggtacaattgcaaacccaattccgacacctgccagggcaaagagggatactaacaacagattggcacctagcccggcgtgcggccaaatcccaacaataactccggctccgccgataaccagacccatgagtgcggtacccagacccattttcaaaacatgccctgcatgcttccacttccgtacactcatcgctgcaattagtgtacctgcgccacttgctgccacgcaccatcccagcagatcagttgaaattccgggaagttgtctgaataacaccacagtctgtgaatcggcaaattgcagaaaaagtatggctgaagcaagcaaaatcagagacgttcctacatgagggagagatgcaagcatgcggataccctccagtgtttctttccaaaaagagccttttgagcggttgcgaacatccccagccgtctcttcctctacttctgttacgttatgaattgcggtttggatcacccgagttccaggaatccacaataaaatgatgccggagatcagaaaagacgctgaatcgagaacaaaacaccaggtaatgccaaaagcggctaccaaaagtccaccaagcgctggaccaataattttggacatctgttcgatcaccgagctgatggatacagcttgggcaagctgttcgcgaggtacaatttccttcagctttccgtttttggccggagagaagattacatcaaacagggatttgaggacaagcagtatgtagacgtgccagatctggtcagcaaaaattaacgcacccacgatgatgatccgtgcaccatcggctacaatcatcagccattttcggttcaggcgatctgcaagcgtgcctgcgaatggccctgtcaacagaatgggtagtgctgcggaaagtgtgacaaatgtaatctcccatggcgttgcattccagcggatacccacgagggtcagaattgcgagcagatgcagccaatcacccagattggaaatggcctgtgccaccatcaatgttacaaaagatcggttattcttcagcggtcgttgtccttcaaacgttaaatcacttgtcatccttcttctcctccattatattccaattcatagtatgaactcattatatagagcagcccttgactcgacctcctgccagaggcggagaaaaagcgacatctgaaggataatttttcagcatgatgaatgatcaaattttaaatgctaaaaatgcaaatcttgtgacatatcgcatgtttttcgtagaaatagaagtttacaattaaaccatggcgacaacctgaatcgtcaaacataactaaccaactcatataagttgaaattaccttttacatgaacagcataacggagagaacagaaataacctgaaaaagcgaagcgttcacctaaaagctttctgaaagaaagctccatcggaagcatacgctatcaccggattttacctttgaagaatatttcaaaaaatctggggataacagtgattggaaggttgttctgtcctcgtagtggtaggttgtaactttatcatttcaacttataaactaatctgaaaaggcgggatcagcatgctggaattacaagaaatcggaaccgaacgttcacttcatctgtaccgcaccttggcccagacattcaagagcgtgaatgaacacgctgtatccggaagcaaagtgcatggcttcaaccccaccgcatacggggtgctcgaagtgttatatatgaaaggagctcagccgattcaacaggttggcgcacaacttctgctgcaaagtggtaatgtgacctatgtgatcgataagctcgagcaaaaaggattgttacaccgcaaacattgtccgcaagacagacgtatcatctttgtggaactgaccgaagaaggacagcgcaccatggatgacatctatccaggctatgcgttgaagattgatcgggcggtaagtggactgagcgaggaagacaaggaattgctgtccgaacttttgggaaggcttgcacattccgcagaccgtttatcagcaagcagctagagcgtcttttcaaacctgccgaaagccggagcgctaacgctaacgaacctgtgacgtcttattcaggggtttgaagcgctcgcagcattgtaaggaatctgacacacgctatctttaacaaacagccgtttacaacgtgtttttcaggtgatttcgggatataaggtgtctcatgttccttacaatttagaaagaggagtagaaggtcaaataagatgtcctccgttccttagaaattcgtctggacgattcaccaggatcagccagcctgtacttcaaaatgctttagacccggacatcccccaacgtatcacttgcctgaatttaaaaatacactctagtccactgcacatatgccatcaacaaaaataaccggatttgcctgacatcggcgaatccggtttttcgtatattttcgtatatatatcttctttttactttgagccttgtggctgcgggggagcatctgcatcttcgggtacaattaaacgtttgcgtagagcaagcgtcgttacccacgagaccagtgcaatgacaaacataatgacaaacagggaatgcaggcttccttccagcacgttacgcagcagcgcccatttgtcatcagatagcgctgcatccgtatgtggtgcgagcagttcattcagatcattctccgaaattccagcctccgccagattctgttcactggataacgtggagatccgatagttcaaccacgttccaaaagccgctgcaccaatcgtctgtcccaacgtacgcatgaatgtgtgcagtgccgtagaggagccacgctccttataccctactgaagactgcgcaataatggtgaagatcgtaaacgcaaacccgaaaccgagaccatatataaaggtcagtataaatagcacagcctgcggggatgtcccgcccaccagaaagagtccacccgatccaatcgcaattcccgttaacccaattaatgcggtcatacgtgatccaattttcatcaatagacggcctgccatcacactaccaatgagccaacccaccgacatcggcgcgagcaacagcccggattccgtcgcattacctccccgaaccccctgcacccagagcggcaaataactggtcaggccgatcatcaaagtactggtcagcagtccggcgatattcgccacacggatgtcccgaattcggaacaaatgtagtggaaccataggggcctgagctcttttttccaccacaaaaaataaaataataaacagagcggcgaccacactcagcacaacaattaacggagaactccaggcataatattgcccacccgccgacaggacaaataacaatgcggtaatacccaccgtgaaggtcagcgcaccgacatagtcaattttggctgtacgcggcgagatatcttccttcaaataacgaaacacaaaccacatcgcgagcagaccaaacggcacattaaaaccaaagatccactgccagccgagattgtctacaaaataaccgccaagcagcggtccagccagagaggaaataccccacacggagctaatccagccctggattttgccacgttcttcaatggcgtagatgtccccaataatcgtaaatgtaacaggaactaccgcacccgcaccaatcccttgaatagcacggaaaataattaattgctccatgttctgcgataggcagcacaggagtgaacccagtaaaaataaggcgcagccaatcagaaatacaggctttcgtccatacaagtcactgattttaccgaaaatgggcgtactcacagccatcgtcaacaggtatgcggtgaaaatccagctcagcagctgtacactccccagctcactgacaatggtcggccctgccggaccaattacggtgccttcaatcgctgacagaaatgtcgcgagcaacagccccgtcaagatgaaactgcgcttcaaacctccggttgcattcacacaaacccttctctcttcattctctatataattggtacgttaatttacacctctactacgaaccagaacaagcttccaatcgctgttatccccagattttttcttctcctctctaaaggagaaatccggtgatagcgtatgcttccgatgtagctttctttcagaaagctttaaaggcgaacgcttcgcttctccagctctgttctgtttcttcgtttacgtgtaaatttaaaagcaattatatattgtctcttttatttacctttcttgcgaaggaactcatcatacaacatggaatacatcaccatatccttgtatccggtggacgtatgttgcacctgtcgcagcaatccttcacgcgtgaagccgcggttcgtcaggaactcgccagacgccagattacgcggatcaaccagcgcttcaattcgattaagacccatggtctcatatccaaagggcagcaatgcggagaaagcctccgtcatataaccatgtcgccaataatcacgtcccagctcataaccgatctcaccccggaatgcgccttcaagctgccatgtgttaaagccacagctaccgatgagcttgcctgtttctttgagttcgatcccccaccggatcgcatcctcttctcctgccatttggttgagcagcccaatcatgtccgccgcttcgcttgtcccaatcatgggtgcaagattcatgtaacgggtcacctcgcgatctgaccagcatgcgaacatctgggccgcatcccggcgacgcattttacgcagacgaagccgcgcagtctccatttcgggaattcttcctttgcatttatacatataaagacactccgatccgatctatctccgcagaccataatattcactagtcatctaatcataacctgcgccgaatggcaactgttcagtcatggacacacgtcaaaaaaccgggccagtttcgctcccggtcttgttgtacgtatggaacaattcaaagtttgagtgaattacatgaatcatggcttgtccaaatgaattttaagctttggacgttttcttgccctttcccagtaattcatcgctaacccggccaaacacagccgtgatttccttgaattcttcgatgccagtcccggtcaggctccattggtccccgtgggcggtcaggaagttctcctgtgtcaggtgttcaagctcctgcttgatctcccgctctccaacgcgatatccccgttcttccaataggggcagtgcctcgctaacgttcaaatcctgattttgcgcgaaatatagtagatgaatccgtacaaaaagattctgtacctctgcatgcataagccaagctccttcccgggttatagccctccgtggttgctaagtaattaccccacgtaagaagctgagaaacaggaggattcttcaggtattcccttccctttccgaaatcctccgcttgactaaccgcatcctctgcactatcttgaaaataagtaccattttgctcgggagggtgatttaccatgtttcaagctgtttcctatgaaggaacacgaagtgagcagcacaccgccgtcctgggacagttaagtgctctgatccgcgatgaacctagtgcgattgccaatctggccaacgctgctgcgctgctcaatgtatttatgaccgacaccaattgggtcggcttctatctgtatgatggaaaagaactggtcctcgggccattccaaggactgcctgcctgtatccgaattccattgggacgtggtgtatgcggcacatctgctgcggaaaaacgtaccctggtcgttgatgatgttcatgccttcccaggccacattgcctgtgattcagcatcgaacagtgagattgtcgtgccgattatcaaaaacggcgaactgtacggggtgctggatatcgacagcccgatcaaaaaccgttttgacgacgaagaccgcgtcttcctggagaaagccgtaagcctgctcacagagcagttggaagcaaccatacccctttaggaaatgatgaataaggtgatcggagtctcatcacacacgatgatgaagaacccgtaataacaaagagcgcagtcctctcagaggtctgcgctctttgttatccattatgattcacacccatgttcttgctcgcccatgttactttatgcatctaggataaatcatgttccgctttaaccatcatcccatcacgcaggaattcagccagccttgggtggtaaccatcatacatctgacggaaatttttatgctctacatacagattggccaaatcccgatagatctcagcggtgggtgtataataacctttgatccattcaagatgcctgccaataatctgttgtacttttgcactaccgggctccaatccgtcctcaatggcctgttgcaagtccagatgaacttgatcaattttcgcctgggaatccagataatcttcttttgacttcatctcctgcttttcaggtaatgtggatgaattggaagattggatgtcggacctctgagcatcgtctgtttgcacatcgttcatatcattagtgactacagcttcagaacccgattcattcagcaactggtgacgccccttatttacaaaaccgatataaagatcatgttcatcaatttcctgttcaccttgcaaatgagagatcgttttgtccagtgtctgaatcaatccatgcagacggagtgccttctccagaatatcaatgcgatgctgcttcatgatgcgtatgacatcctgaggattatcccggagcaacggtccaatctcattctccttcatacccacttccttacagaaaaggatttgctggagtctcaacaattcctgcttttcataatagatgtcctcatctacatccccaaatgccggattcagaagacctgtctccgcatactggctcagttcgttcagacttacgcctgacattcccgatacgtcaaccatggaatatgccatttgaatacacctcctgcctgtcctgcaactccagagttcaggcttaattcatactgcattgtatttgaataatgagagaatataagactttcggcaatgctgtaccgcttcattccgctcgtgctctggatgggtacatcatgcttcagtgatatgagcggcgtttggtcagttatgttgcggtatgttaactatgttatacccgtctcatcagatgtgaacccgcagtcggcgaagaatccgcatgtatttttgaaaactttttccatgatcttcatataaaaaaacctgtgccattattctggcacaggcgtgtgtggttatgttttcattggcatacggtatattgagtaaaataatggaagataatcaccctttgttaaacataacaaatttcaattccgtcatttcctctacagcatattttacaccttcacgtccgataccactctgtttcaccccaccatagggcatgtgatccactcggaacgtcggaatatcattaatcataactccgcctgcttcaatctgatcgacagcatggagggcggtatggatatcgtttgtaaatacgcctgcctgaagcccgtacatcgaatcgttaacatgttcgataccctcttcaacggaatctaccgtattgatcacaacgatgggtgcaaacacttcctgacaggataccttggcatcacgcggaacgttaatcaagaccgttggacgaagaatgcctccttcagcttgaccgcctgctgccacttcagcgcctgcctgtttggcttcttctatccagtctagtgtacgctgtacatctttggaggtaatcagcgcagagaccactgtatccgggctcagcgggtctccgaccaccacttgtttagccgcttcagcgaaactccggatgaattcttccgagatgtcacgatgtacgtagattcgctgtagcgagatacatacctgtccctgatacgtgaaagcaccggtcacacatcgaggaaccactttgtccaggtctgcgtccttatccacaatgaccgctgcattcgacccaagctccagtgtcacgcgtttgagtcctgctttgctacgaatgctcgtgcctaccgctggactgcctgtaaacgtaatgtgagcaacacgggggtgctccacaagcacatcaccaatggttttgccatcaccgctcaccacgttcagtgcaccatcaggcaatccggcttcctgaagcagattagcgatgtaataggaagacagaggcgtctgctccgcaggtttgagaacaatcgtattgcccgctgccagcgctggacctaccttgtgggctaccagattcattggaaaattaaacggtgtaatcgcaccgatgacacctagaggttgccgcatcgtataaccgatacgtccttctccacctttggctgcatccatcggaaccgtctctccggtcagtcgcttggcttcctcagcggcaaaacgatacgtttccaccgtccggtcaacctctgccagtgctgcggtaattggctttgccgcttcaagcgcaataattcgcgctgcttcttccttacgttcttcaagcatggaggacaacttgtacagaatatctgcacgctgatgtgcaggcatctggcgcattgccttcccagcttgagccgcagctgcaacagcagcctccgcttcctctgctgaagccgacgagacttctgccagcgtttccccggagtatggtgcttgaagtgttttataatctacggattcggtcggtttgccaccgataaacagatgttgttttttcatatgctgcatcctccatccttttagaacctattgaacttaatctatttatacactatttccgtgccatcaacccactacggtattcggcaatcatagcttgtaacgtacctgatgagccattgtggcgatcttgagccattgcattataaaggatttcacaacctatttaaccgtcaggacggggcattctgcatgttttaacacgccatgactgacactgcccacgatcatctctgcgagcatccctttcccgccggtacccatcacaatcattctacaatctcgttcacgcgccacacggcagatctcattaacgggatcacctgcaatcagtagtgtttcatatgcaatgtcacgcccggacaactgatgagtcacaggttctataatatgttgcccttcttcggcaatccgagcttccagatcaacacccaatgcaggttcattgatcgaaatggcaggattcacatgcacgatcaacagacttgcgggatgtttcatatcttcagccaggatcagagcttgttccaaagccttatgagcatgatccgaaccatcaacagcaaccaatatacgtttcaacattgcaattcctcctgtgaattaatgagatgtaatggcggaatcgatatcccgcagatgatgacggcgcaccagcagtaccacgactccaaccagaaccattaatgcaccaaaataaaacggcgtttccggcaggaaccactcggacaatttacccgcaagccatggagcaagtgcaccacccaggaaacgaacgaagctgtatgcagcagaagcaacagaacgctctacaggtgcagcttccataacagccgttgtaattaacgtgttgttaatcccaaggaaaatccccgctacaatgactgccacaataacggtagttggtgaacccatcaccgtacctactgccataacaaccagatcaatcgcgaacaatgtaagcatgacactcatggacggaaccgatccgaatcggcgttgtaatcttggagctacaaatactgacgtaatcgccagcatcagtccccagccaaagaatacataacccaagccgtgctcatccagattcatgacatatggtgaataagccatcaaggtaaagaaaccaaagttatacaggaaggcggtaatcgccaatgttttcagtgaaggataacttaatgctttgaatggatcggacaaagaactgcgtgttttcggtttggccatcttgggcaacataaatgtaatgcttataaaggcaatcgccatcagaacagccaccccataaaacgggccgcgccaagagatggaacctagttcaccaccaagcagtggaccaaccgcaatcccgagaccaagcgctgcttcgtacaaaataatcgctttggctgtccctgacgtggacagtcccacaatggcagataacgccgttgcgatgaacaaggcattacccagtccccaaccgccacggtaaccaaccagtgcacctaccgtgtctgaggtaccgccgaggaacgagaagataataatcagcaatataccgctgagcagcgtccacttcacaccaatccggctggatacaacacctgtaatcagcatcgctacaccggttacagcgttataactggtaaatagcagcgacacctggcttttcgaagcatgcagctgatctgcaatcgcgggcaggatcgggtcaaccagacccagacccataaaggatatgatacatgcaaaggcaaccgcccataccgctcgcggctgggataacaggcccccacgtgatgacggcaattcatccggtaatgatggctctcttttcatacgtaattcctcctgtgaataatttatgtggttaagttttatatttgaaaacgaccgtgaaaataatgaaaacattctatacattttcagaattagaggtaacaaaacggcacaaatgacaccgaaacatccggtgtttgtacaggatcgctacaggtactatgttgctcactccatgtagcgattatgtgtatacagttttgtttatttgaaaatagatactaattcggttagccgtcttcatcaccctgcggatcatgtgcctttaacttctgaataccgctccgaacgcgttcacgtagctcttccagttcattctgtacggcatgtatgctctgaagtttctgctcaatcagttgcagctgaccatccagcgttgtttccatcgcggtaagcttctcgatccgttctcttacttcggtcgtctgctggtagtcaaaacgttgttcgttcaaggcatctgccgttgccacataggtatgtaactcctgaagggagaatccaagtacctctttggcgcgaaccacctttttcagataatcgatatcctcccgagtgtacaaccgcgtcccgccatctgtccgctgaggtgaaggcatgacaccaatctcttcataataccgaatggttcgcttggtcaaaccacattccttggctacgtcgtcgattttatataaactcatttccctcacctcttccatatgtctataatgttatgtacataattatatataatattaacgttaacgtcaacgttagattttgtgtatgaagtcttagcgagtttaacatcctctacagttttctatttcaacaaaaaaagacccgcttcacacgcgagtcctcttctctaaacctattcactaatcttaccttaaacgttctgctcattctgttgctgttgagcacgctgcatttgcttcaaccggccttcaactctggtaaacaatctgaacgtataaaatcctgtagcaaccagactcagaaccaaagctcgtacatctgtaagccagaaaccgataatgccgaatatcgtgataatcacaccaaattgcatcatcagattggcgctataactttgcgcttcgtcccacaactcgggattactcattgcacgcggggtccgatacccatatatcccgttaatcattttcggtggttttttgaacatcatgaaccccagaatgaaataacacaccccgatgatgatccctactactgctcctgtcaaaacgttctccccttcactgttgtcttccatagacctgcttacactggcactccgatgacagaataaccttccgatgtagcttcgcttcttcaggttatctctgtcctctccgttctcgtgtaaatgtctagttagacttatctacataaaaatataaaaacggctctacgtatatacgaagagccgcctggatcgtttcgtaaacttagatattcttcactcgaagtacacgcatggcgttcagtacagccagcactgtgacaccgacatccgagaataccgcttcccacatggtagctatgccgaacacaccgagtaacaggaagatcgctttaacccccagagcaaacgcgatattttgccacacaatcattcgtgtacgcttcgcaatgcggattgcactcgctagtttcgacggttcatcggtcatgatgaccacatctgccgcttcaatcgcggcatcggagccgagcccacccatggccacacccacatcggcgcgcgccagtacaggtgtatcgttgatgccgtcaccgacaaacaccattttctccttcggagatttggcagcttccagttgctccagacgttcgactttgtcctgtggcagcaattcagcatagacctcatccacacccagctcacgtcctaccgcttcacctacggctttggcatcacctgtcagcatgaccgttttgcgaatgccgagtttcttcagcgcctgaatagcagcggctgcgtcatccttcacttcatcggcaatgatcagatgaccaacatacgtgccagcttcagccacgtggactatcgttccggctgtctctggtgtggtataggatatacccgcctgcttcattaatttggcgttgcctgccaacacttcccgaccattcacactcaccttaatcccatgtccggcaacttcgtcataaccttccacaccttgcgtgggaatggctttggcccaagctgcgcgaatggattcagcaatcggatgattggaattggcttcggcaatggctgcaagctccatcagttcttcttccgtgcgtccaccttcgggacgaatggctgttactttgaatacacctttggttagtgtacccgttttatcaaaaacaacaactttcacatcgttcaacgcttcaaggtagttactgcctttgacaagaatcccgttacgtgaagctgctccgataccaccaaagaatccaagtggaatagagaccaccagcgcacaggggcatgagataaccaggaagaccaatgcacgatagatccaatcggcaaatgttgcaccactaagtatcaacggcggaacaaatgcaatcacggctgcaaggataacaacgaccggtgtgtaataacgggcgaatttactaataaaatgctctgttttcgctttccggctgctcgcgttctgcaccaggtccaaaatcttggataccgttgattcaccaaacgttttggtcacttcaatcgtcaacataccatttttgttcacagatccactcagtacatcacttccggactccagctcacgaggtaccgattcccctgtcagagcagaagtgtccaccatggaacgcccagctctaacgataccatccagcggtactcgctctcctgctttcacgacaatacgatcaccaatccgtacgtcttccggagatacacgccgggtctcgtcacccgaacccgtcaggatattcgcgtagtccgggcgaatgtccatcagtgactgaatcgacttgcgtgaccgattaaccgccatgccctgaaacagctccccgagctgatagaacagcatgaccgctaccccttccggatactctccaatggcaaaagcacccaaggtagcgacggacatcaggaagtattcatcgaacacctgacctcggatgatgtttttggacgcctggagcacgatatctcccccggcaatcagataggcgagcgcatatagagtaaactgtgcccagccctccagcggcgaccagattgcggctgcgagcaacacagaacctgcagcaagacgagcaagcaacacttttgtctgtcctgcaccatgttcatgtgagtggcctgcatgggcatcatcatgggtatggctgggatcatgcccagcatgactcccgtgctcatgtgtatgaccatgttgatgttgatcatgagtatgcgagtgtttgccatgtgaatgtgaatgtccatgattatgtccggcatggtcatgactgtggttatgcgcaccagctgcactacctgtatgggtgtgcacatgtccgttcacgtgttttcctttttccgaaatgcgaatatgcggctccagccgaaacactttgcgctttgcttcttccactacctgttcatccatatcggaagtggtgtgtagcgatagtgttttggtaacaaaattgacagagcattcgttaatgcccttaatttttttgacgccattctcgatctttaatgcacagttcgcacaatccaatccatcaagcagcagttcccttttcacctgttcctgtccggttcccatgtgaattctcccctttgcagtacaaaaacgatgttatatttaaattgtattcaatatatgagcactcattcatatgtttggttacccctattatatgcacgcctaaacatgagtgtcaacaatcgttgttgatttttcatacagattatgctaatagtaatcatttcgctttaggcgggttttggatataatagagctatagttgttaacataggcggtgataggaaatggaacaaccggttaaagcaccaagcgaatgtgatgcagcctgctcaggtactgaagccgacgtacagacgattcgcacttcactcatagatcgggagacgtcttccgagatggcagattggttcaaggcattcagcgaccccacacgtctacgtattattgatgcgctgttacagaaggaattatgtgttcatgacctgacggttctgctcgacatgggacagtcggccatttcacaccagttgcgttcactccgcaacatgcggatcgtcaagcggcgcaaggaaggtaagaccgtgtactactctctggatgatactcatattgagcagattttcctgcaaacgctccaacatattaaacacagctaggcagcagccaagcttgttcatgcagaagaacccccgcctctcggctgtatgccgatggacgggggttcttcttggtaagggtaccgttttatacaggatacaaagtgactaaatcttctgattaactatctcttggagcttgccacttcggttataaaagattgttcttgttcgggtcgtacaggcccgatctgtccttaaaccagttgaagatatgtgatacacatactttgagcaccgcgtatcctggaacagcgagcagaatgcccacgactccaaacagattacccgaagtcagaatgacaaagataatcgtgataggatggattttcagcgttttacccatgatctgtggtgagatgaatttaccttcaattaactgtacgatcgtccatacggcaaccattttcagcagcatcaccggagaagtgacgagtgccacgatcaatgctggtgtaatcgcaattgcaggtcccagatacggaacaacacttgtgaacgatgcgataattgcaagaatcaatgcataatccagaccaatgaccatataaccgatgtagagcagaataccgatgcagaagctgacgataatctgtccacgaatgaatgaactgatctggtgattgatgtcttccagcacatgcattgcgcccgtacggctcttgatcggcaggaaagacagaattttcgctggcagcttcttgccgtctttcagcagatagaacagaatgaatggaaccgttacgatagacagcacggtctcagtgaaagctccgaggaatccgcccaatttggtccaggtcgagttcagaatttcagtagccttttgggagattgttccccaccagtcctgcgaattcagattcaccgtttcctggaactgaccgaacaatttactgcccgtaagctcctcaaactgctgttttaccgtctcactgtaggttgggaaattttcaatcagccccacaatctggttacgcacaaccggaatgactgccagcactacgacggtcagaatgcctccaatcgcaagatacaggattagaatggaccagccgcgcttaattttccaccgctccatcacatccacaatcggattaagcagatagtagagtatgcctgacagaataataggtaacacaattgttttgatgagtactgcgagcggatgaagaacaaaggatactttggtcagaaccatcacgttcagtcccaccaacagcagaattagcagaaataggacaaacttgttgttaagaaaaaatcgcttgaaccgctccggccaaacgcggggttgctcaggttgctccataggcgtgtcgtcctctcttatgacccttaatcaaaactaaactataaagctaaataaatgcccacacacgaaaaaataccttgtacaagccaacatatgtataacactctggatttatacgtatggtgctgattaaccgtttcaaattaaaccggtaaagtcattttaccccaaaatgagtcttctgccccacacgaatcatttgcaaattctccctattcaaaaacggctcgcctcactgggagacgaaccgtaaatttatagctataccctaccattaatccagcttttacgctgaaaaatgaagattaagctttccccgccaattgtgcgattaactcataggagtgcagccgtgccttatgatcatagatcatcgacgtaataatcagctcatctgcctgcgtctgccgaatgaaagattccaactgtccacgtacggtttctggtgaaccattaacagctgccttcagcgtctgctccacaccagctttctcacgatccgtccatttgccttccatctctgccggaggctgtaccaatcccgttgtgccgcgaataatgttcaggaactgctgttgcatcgttgtacccagccatgctgcttcctcgtctgtatccgcaacaacggcgttaacaccaacaatcacatgtggctccttcaagctatcagatggttggaagttgtttcgatacgtctctaatgcgatccgggtataatcgggcgagaagtggctggcaaaagcaaacggcaatcccagctgacctgccagacgtgcactgaaatcactggaacccaagaggtaaattggaatattcaatccttctccaggaactgcgcgaacaggtgcatgataagatgtcgccgaagcatcaaagtatgctctaagttctgccaacagctcagggaaatcttccccactgttcagatctttgcgtagcgcaagtgatgtacggcggtcactacctggtgcgcgacccagtcctaggtcaattctgccaggatacaaggattccaatgtgccgaactgctcagcgatgacaagcggtgcatggttgggcaacatgatgcctcctgaacccagacgaatcgttttggttccaccagccagatatccaataacaaccgaagttgcggatgaagcaatacccggcatgttatgatgttcagctacccagtaacggtgatacccccaacgctcagcatgctgtgccagatcgagactgttgcgcaaagcatcagcaggtgttgcacccacaacgacgggagccagatccaggatggaaagcttaacgtcattaatatgttctttatgggatgaagccgtattttcagtagtcattatcgtttaatctcctcgatgattatatttttgtatatccagatatatagattaattaaatcacaactggatatggtgatgtgttcataaactagccgtttacatccggacggaatccctgcctgcatatgcatcctagcttccgttccggcatccggcttataactcgttctgtacatactcggcaaactgacgtatcgtctcctcgttgcgccgataatacgtccattgtcctctgcgctcggagagcagcaaccctgccttgagcatagtcagcagataactggatataaccgactgagccagtccagccttcagttgaatcgtgccaacacagattccgttcttgccaccatccggatgctgagatagttccagcggtgggaagtgttgctccgggtttttgagccacaacaggatttgtctacgtgtctcgttcgataaagctttgaatataagtataggttccatgggtacgattataccccctttcatccattttgcaaacacatgaacaaacaaaccgactcatgatcgagtcggtctggtatcatatggaatccctatagggtaccaacatctatattagaatttggttgtaatcgtctgtttaacctgatccaacatggcttgatatgcaggggcatccaggtatccaatactaccgaagagcagatgatctacggcttctatacctacaaaatcgaagatacctacgtctgaagttaatttcagtccagcagtcatgccaatctgatcataaatttcacttggtgtaccatgtgtgttgatgatgagtccttttttgcctgtcagcaatttctcgattcccgcttcacctgctgcatatgcaaaaccataggcgaatacacggtcaacatatcctttcataatggcaggaagacctgtccaccagatcggatagatgaatgtgataacttctgcatccgtaacaaactgttgctctgttgcgatatcctgtggtgtctgtcctgcacgcatggaagctgtgtcagcttcagtcagtacgggttggaatccaagtttgtacaagtcacgaacaaccacttcatgtccttgagctttgagagcttctacagcagtattgaggattgcgttattcaagctgtctgtgtgcgggtgagcatatacgataagatgtttcatagtttgaatccctccaggtttggtttgagttaggttgcgaaaatggggttacattgatacgctccagcatacatagatatctatgtatataggcaaaaaaatatttgggctcctctgcctccaccccagtcaaatctggaagggttgcagacagaagagttcattcattataactttcggacaataatggataacaagctctccaattgctccgactgttcatcggacaagccactatagatgatatcattaatctgctctgatacctgatggaagatcggttcgagtcgcttcccctgttcggttaggcgaatcatcgtcacccggctatcttccgcactcttgttgcgttcaacatagccaagcttctccagcttgttgaccagtaccgttaccgttggttgcgtgcgttgaacacgttcagccaacatcttgattgacagcgtctcttcccggtacaagaacatcaatacatctccatgagaaggaacaatccctgttacctcatgctgttccaattcgtgtacaatccgtttgttgacatggtctctgattcttgcaatcagtgcaattgcgttgtatttaggcatgacctcattatacatagacatctatgtattttcaagttttttttatgaaaagaaaaacagccctctccaccctgctaacatgtggaaaatatcgggctgtttcgattctactttgatcctgatctttatgttagatcttagataatcgtttttaaattcatgttgaattcatgctgaattcagttaatccattgcgtgattttctcaacggattgtcgggacttttcacgctggggctcctctacccgataaccgaaggctgccatcatagagacgccccatgcgccattttccagcaagccctcttcttccataatacggtggacgccctcacggctgaaaccttcgatcggacaagaatcaatctcgatctgagctgccgccgtcatcatgttgccgagtgcaatataagtttgtttagatgcccagtcaaataatgatcgtggattatccagaatcttctggttactttgaaactttccataagcctcacttgttatctcaaatacgttatttggcattccctttgtttccttcaacatgtactccgcataaggagaattataactggcatctgaccgggccaaaataacaacaaaatggcttgctgtagccaattgcttttgcgcgccggaagagacttcggacagacgcttacgcaggttcggattttgtacaatcagaaacttccacggttcaagtccaatggaacttggagataatctgcctgtttccaatataaattggaaatcctcatccgagattttgcgggtatcatcaaatatctttgttgcatgccggaaatgatacgcctttaagatgtcttcctttgtctttgactttgctgtaacttccatggagctccacgtcctttttataactttttttatgttgaacaataatgtttaactggtttcatctcaagtattagtttaggacctatgtgtataaattaaaagtacgcacattattgtttcttggtttataaaagtaagtattggatgaaagacagcaataatccactgggcacatacatggccctagtggattatctatgactcttttcttttaaatcttgaaatcttgaaccagcttattcagatttaatgcactatccttgacttgatcagattgtttaactacttccacagattgcgcagcagaggcaaccatatgtcctgcaatttcctgactggatgcggctgattgttcactggctgatgcaatttcgtgaatggagcccactagtattttgatattcgcagtcacttgttgtgaggttgcattgagatctttaactgcattggcatgatcaagggaatcgacataatactgttcagctgtatcctccaataatttataatctttgccaacctgattgaacataaaggatagcaactctttggcatttgaggacagattggttacagactgcataacttcttccgtgacctgctgaatttgatcggcagcctgtctggaatcatcagccaactttcgaatctcgcttgcaacaaccgcaaaacctctgcctgcttctccagcccttgcagcttcaatggatgcattgagtgcaagcagattagtctgcgccgtaacatccaaaatagactgagataatataccaatctgatctacagcagttgcacgttccagcgcttctgacatcttcttactcgtatgatcaaccatgtctatggctgctcggctcgattcgcgggcttcctgcttcaacttttcagccttcgtgctggtcacataggcggactctgcttgtttagatgtctgttccgatatatattcggctccctgttgcatctcagcagccgaatgattcatattttccgtatgggctgaagcctcttccattgcagccgagagctcttcaactgtagctgatacttcacgaatccgttcattcagaccagccatgttctggttggtaagatcgctaacctggttgatatgatgagattcctgaattacaccacgaatgacatttgttgtggaatcggtcattgtacgaatagctcgtgcgatgacacttatctcattatttccctgtgttagacgcggatctaaggatgccgttaagttgccttgcgttatttcttcacaataacgggtgatcgctttcattcgttgacgtatactgcgaatcactacaaatgaaataagaatgagtgctgcaagtgaaaacaaaagaaccgaaccgagcaccaatgctcgctgctgaattatttcctgtgtatccgcatagagcttggctgactcttcttcgttatgcgcactcaaaagggtgatcgtctccacaatcgctgtactgcttttgttaattcttcctctctcttcactatcgtaggtgcctgacatctttttggtatccataatttgctcaatatcctgataatatgtatccatctttgctaccaaatctgcaaatatctctttttctttggtatccaatgttcttgctgaaaattcattcaagccatccgtgatactcttcttacctttctgaacctgatcgtactgtttgtcggtatactctgcattatcaaggacctttgtataattggcacgcatattatagaaattacttttcaattcaagaacattggtttggtgctggaagcggtcattatagaggatgccttgtcccgtttttgcttcgttcattccgaaaatcccaatcagaaaaacagtaaacaagccgattagactaatcacagtcatgatgaccatcgttgttgttaatttaatatttttgagtttatttcctttcttatattttggcttagactgaattgacatgattattcccccactttaaatagtagatagccttatatatcttatatctatatcgtatgtatccatattgtttgttagcatttcaggaaaatcgactttattcatttgatgagaaaagtaatgggagacaacagaaaagccgccaggatataatccagcggcttttctgtgaatatgaaacgataatctgtgcgacctatagttgctgcatccattcattttcagaaatgacggtatatccttcttgtcgcagcaatgctgaggtgacaccttctccagttaccttgtgattggcaaaattcccatcatagatcatctgtgtaccacaggacggactaaactccttcagtaccacacacgatacattcatttctcgcgcccattcgagcgtctgataggctcccttaatatacaactctgtgacatccttgccgcttttctcgatcacttttgcagtgcctgccagcacgtccttgcccgtgccaccgataatttcagccgcttcccgtggagtggagaatccgccaagcagctccggacataccatcttagcctgcttctgctccaccagctcctgaatctgctcatccaggctcgctgttccattgtaacggcaagctacccctgccagacatgaactcaccaaatatttcatcgctatctccttatacttattccatctatgaagtaaattgtaacatataagatcagccctataactcgcctctggtgatcatcttgatccgtccatcttccctatattcaacctgaaaaacatccttgctcgactccagttcaaatgtgaccatgcctggatggtcaggattacggtgaagtttatacgcttgaagatccattttaaatatttttttaattataggttctacttctcctctaagaagagactcctgtatgttatatagttcctgataataagcctctatttcttcccagtctgcaaagtcttgctcataatgattagcatccccaaccgtataacccaagcccgcttttccttcggttatctggacaaagtagttatctttaaaggaaaaggagactgtatccttgccgagttcatcatctttgcttcggcttgctcttaccagatcaagattggctttaccagacagagcctcaatcgcgtttctggcatccgtcagcgctgcctgggatacttgatcaggtctaaggtcgcctgtgatcgagacagccttgtcctgttgccatacaatctccccataaccatcgccagtctcattctctaacgctaatgtcgtatgtgatatcggctccaattccccttgcttcatactcacaaaacgttggactgatgcaggtttaagcgttggagtgctgcctatactttgcaaaagcgatggaacttgacgcagataacggtgttccagctcgcttggctgcatctcacgtctcattcctacttcacgcagatttcctgttgtcgcatcgagccatatctgtgcatactccttctcactttcatttccagcctctacatatattctgccggacacaggcaagtcttccactttcataattttcagctgtttacccagatcatctcgcatggtagttgcaacatttcttttcattttgtcggttagcagatttgtgttcaaaccatcggataactgtaacgctgctgtcggatagacatgctcgatcacgggtttcaccagctgtccatcatcccagatccataggaacaatccagcagcaataaccaacgcgcccgtgccggcaacaagaggccctcttctaaggcgacgcttgtgtgacgcatttttcacttgcggtctaaacggcctggatgacctggatctgctctctggcctatctcccttgcttccctcttccgacttcttcatccactccacctgttgaagcacctttcgcttgtgatcctctgtaaaaggagacgacgcaaacggtcccttccggatttccttctcccattgctcatccttgtgtgtcatttgcttcgctcctcccattgtttccgtaccttatccttacctcgggaaagtctggattttactgtacctgagctgattttcaacatctcagcaatctcactcgtcgtaagctcatacttcagattcagcaaaagaatctcccgaaacttctttggcaacgccagaacaatatcccagatttcatggatatgctccttacgcatcacttccatctcggccgaaggatgtgcaggctgctctgcaatcatgactctttggttcgaacccccatgctctgtctcaatgggtaacgtctctccccacagactgttacgaaaaaatctggattttcgatatgtaaaagtggtgtttctagtaatcgtcaatagccaggttttcagtgagcaatctccacgataatgagcgatccctgagtacgcccgaataaatacctcctgtgacaattcatctgcctgttcggcacttttggtcagaaaataagcgtaattccagacgtcatttccgtagtcatccattatgctgctaagtgtgtaattgtctatggtctgagcctgtgccagtaattgatcatccaactgttgttcacctcacttaatatgactgagtctaatgtgatttggttccctgttttggacattatttcttattattgtagcaaaataaaaaacagcatgttcaacatcgctgaacacgctgattccttcaagtttgcttagttagaaatctctatcagaaagcttttaagcgaacgctccacttcctcagtttctttctgccctctggtctatcatatcattttcatcgttatactttcaccgcagcaatcatcagaaacatcggtctccgattttcgtctcgcatgccaggaacctgttcaatcatctccggtgatggtttggattcagccaccttttgaatagcaaaccctgccttaatgagttcatttagatgtgttgccagtgtgcgatgatatttaaccacatcctgattcagaaagttcgccacacgtttcccttcatcatggtaatcatccacgggccagtgcaggatttcaccttcgggtccgtaatgccaatcctgcgcagcgcgagcggtgaagatgggatgttcggaagatagtacaaatgtgcccccttctacgagaaaatcattgatcttagcatacaccgtgtctaagctttcaatataatgcaaagcaagtgaactgatcacaacatcgaattgtgccggtgcaaaatcaacatcttcaatcgccagctgcttgtactcgatctgcggatcgtccgtcatttcacgagcacgctgaagcatattttcagacagatctacaccgatcactgaactcgcttgttgctctcgcgcataccggcagtgccacccaaaaccacatcccaaatccagcacacgcttgtccttcaaatcaggcaaaagagtctgcagttcatgccactccccggctgcatccagcccttgaacggaacgagccatcttactatagttgtcgaaaaattcagcttcatcgtatttattttgtttcatcaagagattcctcccgccttataaatatccacctactctatcacataaacaatatttaaacgcaaaagttgccaagagaattcatggcgtgttatcatacagaacgaacgttcagtattattatatacagaatgaacattcagtttactaacggaggtcattatgaatacgaattggacgcatccattggaagagcaatctgtaggtaaagcttttataagttacctcgtgccttctgtattagggatgctggtagttgcttttaattttattatcgacggcattatggttggacacaaactgggttctaccgcaatggccgggatcggcattgcctcacctgtctacacgctctttgttgccatgtcgctgtggattggtatgggcggggcaaccttgtactccaacgctatgggtagaaaagatatcacatcagccaaacaaattttcaccaaatccattatgctcattatgttagttacggtagccattggatatgttgcatttacattcaaagacaaactggtatactccctcggtgcgaacgccgagaccttcccgtttgcttcagactatatgaatatcatgttattgttcgggttcgttttcaccatcgagaatgcactctctatctttgtacggaacgatgggaatcccaacacatccatgtacgctcagattacgtttgctgtagccaatatcatcatcaattatataacactgtatgtactcgaatggggtgtacgcggtgtggccctcggtacaattgtatcggcgtctcttgcgctacttgtcctgtttactcattttttcaaaaaaacaaataatctcacgttcacccggttcaaatggaaaaacaaactgctggcttcccttctactcattggtttccccagctttctggctgaacttggcatgtcggtcttctctgtctctcacaatatctccatggaccgcattgcaggcacggatggtgtagcatcctttaccgtgttgaactatattcatggtgttgtattgttggctttcctgggtctggcatccgctgcccaacctctgatcagctattatcacggtgccaatcagattaaacgggtacaacaaacgatacgtttagccactaaaacagctctcgcatgcggtctgttgttactggttgttgttcagatcggtgcgccttatttcgtgcaaatctttggaaacttcagtaccggcgtaacagataatgccgtctacggattacgtatatttacatttgcctatgtgtttatgggtgttaactttgtcatgagcacctatttccaatctgtaggtaatgccaaaatggccatctggattacagctgcgcgtgaaatgattatcatgattgcgttgattgcagtcctgccttcattttttggtgtcacgggtgtctggcttgccgtaccgctgtccgaaatgctggttctcgcaaccatagccctgtactatagaaaacgatcccttacggatcgaataaacgcgttgcagtctgagtagccataatggattaaatgaacgtatagagaacagatatagtcctgctcggtctacatagatcgggcaggactttgttatgcttgaagcaaatataatcagaaccaaatatcgtatcgtccattgctattaacagttgcttgagcactatagctatagaaaatgtgaatgatctatgaataaagtgtatatttaacaaaaataggatataaaactatctttatataattgtatatatttgttaattggagtatggttgtcttgtcaaactatatacggcgccagacctcccctcactttcatcctaggaaatgactgtgaggaaagctactgcgagtatgaccaatcccgacttatatatatgaaaaggagatgttcgattgtgaagaaatatcaaaaaactgcaatttcagctctctcttccatggctttgctcctagcatctgttccagcagtatttgctgatgaaacgtctatgcctataattccttcacaagatactcagataaaacaggaacaagaagctactatctttgcccaaaaccttatagtagagtatttcgatggaggttactcaacggatatatatttgagtgggaatgtcacgttttcttttcttcctcgttcgactggggaatatgtatttaatgttgttgatatgagtggaaatttgaagggaagtggacgagtaatcgcatcagacttgagaacgaaaaacatcactttaagtaatttgtatggttaccataaaatcgtagggtactcacctaatggtgggggaggagattaccaaattcactattaaaatatactaagtcgtaggaatcatactgtatttgtttacttatggaatgtcatacagcgcaggggagacccctcggctttcactcaattctttatatgcaatgtataaaatagtaacac

SEQ ID NO: 17 - DNA, 68391 bp, Paenibacillus xylanexedens
  source 1..68391: mol_type = genomic DNA
atttgcaagctctttttttaagtttctttcgaagcttatttcattcgcttgccgcaccgtgtaaaccgtgttttcttggccggaattagaatataccatgtacagatattgaatgcaagtctttttttgaaactatattaacaatcggattgatctaatacggacgtacatatggtattctcccaacttagcaagttcatacgcacgtccatttttactttaacgtttaacattcctagcagaaacctttcttggccataaactgtaactaaagcttatcagaaaatcgattccgagtatcattccccacactctgatcagattattgaagacagctgtacgttcagcatctccaatccaccatatcatggccaataataaagcacttcctatagcccaagccaatagatgtctaaaccatccactacgctcacgactcgcatgttctctaccatataacttgttactacgagggttttctccacccttgaaccaatataggaaatatcgatccgcccaagcgatcatctggtgaccataggcaatgcttactcctatatacaccgcagctataccatgaatcatacttgctgtagctcctcgctgtagatctataactgtagctaccagcaataacagatcgataaccggcgtcgccattaacaaaccgatgcctaatcgcttcatgccaaggagatacctgacactcagacctgcgaacacaaacacccaaaaggcaatctcacaacctataatgaaataaccaatcatttcagcctctccttttttgatacaaatgtattaattataatttagcacgtgtgtactataataatcaacagtgatataatatgcctatgcctaaaattgttgatcatgataaacagcgtgtgctcgtggccgaggcggcttggcgtattatacgaagagatggcatggaacaggcctctgttcggaatattgctgaagaagctggagtttcggttggttcgatgcgtcactacttttctactcaatcggaactactacgatatgccatgaatttggtatctgaacgggtgtctcatcgagtccaaaaaatgtccttcaccggctctcccatggacaatatgaagcgcctattgctcgaattcttaccaaacacggaagaaaaactggccgaaatggaggtgtggtacgcatttacagccagatcgaaaaccgatcctactctcaaagaacttgctaataccgtatatgatgaactcagacaagctgtaggctcggttatcacctacctgataaagcacgacctctccagacccgatctggacaaagaactggagatcgagagattgtatgcactggtggatggcttaggcatacataccgtgcttagaccggatcagatgaatgccaagctcatggacgatgttctcactttgcatcttgcttccttgtgtcgttaaaccaaaaaaaccgcagcacattcgttgtgactaaggcccgttacgataacaggagttagttctgaatgtctgacggtttttctttttatccgataatgatccggccctccggatgacgatacagtttcttctctttgcgcggacgaagggcatacgcgatggttaatggcccaatccgacctacaaacatggtaaaggtaataatgatttttccccaattggtcaactcatcagtcactcccacagaaagacctacggtaccgattgcggatgcagcttcaaacatcagtgaaaggaatggcgcatcctctgtcgtaagcagaagcatcaccacgatcatgaatatgatcagagaaaccataataatggtcaacgccctcatcagcagttctttcggaacacgctggcggaaaaacacaatatccttatttccccgaatcatggcatacaccgcaccaatcatgatcaggaatgtagtcgtcttgattccgcccccggtcgatcctggggaagccccgataaacatcagcagaatgaagaagaattgggtagcctgcctcatctccgtgatatcgattgtgctcgttcccgacgaacgtgtagagacagactggaagaaggacgcatagatcttctcgctccatgtgagtgaagccagtgtatgtccattggtgaattcgaaaacaaacaagacaatcgctcctataccgatcagcgctccggatacagacagcaccagtttggactgaagagataaacggcggcgtttgcgatactcaaacaggtcattcaatacaacaaaacccagtccaccagagacaacgagcacagaagcggtcacattgaatatccaatctccagtgtagtattggaagctgttaccaaacagatcaaatccaccattattaaacaatgaaacagaatgaaatattccatagtaaacagcctgacccaatggcatctccgttgcccagcgcagcgctaatatgacagcagccaccccttcaatggtaaaagagaaaatcaagaccttgcgaataatgcgtactatcccttccatactgtctgcattaatggcttctttaagtaataacctgtccttgagtgagattcgcttgcccaatacaagggcaaagagagtagccatggtcatgaatccgagtccaccaagctgcattaataccataatgacgaactgaccaaacaaattaaacgttgtccctacatccacaacgacaagtccagttacacatgcggcagaggttgatgtaaagagcgcgtcaataaacgccaaatgcataccgctttggttggagattggcaacatgagaagcaccgttccaatcgcaatgataagcagaaaaccaccgaccagaattaacggaggagataagaatttggcaaagtgaagcctgaacttcatgaagggcacctcttttaacaaaaatacgaacaggttaatctaacaatttcaagacgcggtgttacccttatggtgtgctgtgagcaagggccttctgacaaactttatttttagcgtctatgtaaacctaaagaggaacttgccccagcatgatactgaacggcaggttcctcttctattatgaacgtatcctacgttccttatttaatcttgcgtacgaggacgcatgtgcgggaagagtagtacgtcacgaatcgacggggagttggtaagcagcatgatcagacgatcaaccccgattcccaatccgcctgttggtggcataccatattcgagcgcacggatgaagtcgtcatccatctcatgagcttcgtcgttcccatgttctttctccagcatctgtgcttcaaagcgctgacgctgatcgattggatcattcagctctgtgaaggcattggcatgctcgcgtccaacgatgaacaattcgaagcgatccgtaaagcgcggatctacatcatttttcttcgctagtggtgagatttcaagaggatgtcccataatgaatgtcggttgaatcaacgtctcttctacaaattcttcaaagaacgcgttcagaatatgaccaaatgtcatatgtttttcaaccggaaccttatgttccttcgccaagttgtgtgcttcctcatccgtcatgtgtacggagaagtctacgcctacaacttccttaactgcatccaccatcgtaacacggcgccactgtggcgtaagatctacttcataatctccatactggatcacttgcgtacccagtacttcctgtgcaatatgagcaaccaggttctccgtcaattgcataatatccttgtagtcggcatatgcctcatacaattcaatcatggtgaactccggattgtgacgtgtggacataccttcattccgatatacacggccgatctcatataccttctccagcccgccaacaatcagacgtttcaggtgaagttcaatcgcaatccgcatgtacagttccatatccagcgcattgtgatgtgtgatgaacggacgtgctgccgctcctcctgcgatcgtatgcaacgtaggtgtttccacttccagatatccaagggaatccaggtaacgacgcatcgattgaatgattttagaacgtgcgataaaggtctgttgtacgtccgggctcataatcaggtcaacataacgctggcggtaacgcagctctacgtcagtgagaccatggaatttatccggaagcggatagagcgatttggacagcacttcaatatctttcactttgacagaagtttcacctgttttggtcttaaagatcacacccgttaccccaacgatatcgccaaggtccagcaggctaaatgccgcatacttgtcttcaggcacgctatcctgacgaacatagatctggattctgccgctcaggtcctgaatatgtgcgaagcttgctttacccattccccgcttcgccataatccgtccggcaatactgacttcgatgtgcttctcttccagctcttccttggtcagttcttcatacttcttcagaatggagccggcttcttcggtacgtacgtatttttggccaaaagggtcgattcccaatttgcggagctcgtccaatttgtcacggcgaatttgtaaaagctcgctaagttcggtttcctgattcaagacttcatccgtcatgatctgtattcatctccttatttacattgcaggcatcgcgagaggacgtttttcctctaatgttgaaaaagcttccctaaggaagcttttgtttaccgtgcccaactgcttcgttgctatagctttttaatgtccataattttatattgaattacgccagcaggcacacttacatcaacaactgtgccttttttcttgccgagaatcgctttacctacagggctctcattcgatatcttgttctgaagcgggtctgcctccgcagtacctacaatcgtatattccgtgatgtcaccaaactccagatcttctacagtgacggttgcacccacgcttacggcatcggtatcgatctcgtcgctgttaataatccgcgcgttacgaagcaatttctccaacgtgattacacgtccttcaatgaaagcttgctcattcttcgcgtcttcgtattcagagttttcactgatatctccatacccgatggctaccttaatccgttcagccacttcgcggcgcttcactgatttcaatgtttccaattcttcttccagcttcttgagtccttctggtgtaaggataacttccttgtcgctcatctcaaccgattctcctgtcatgggaataaatttgattgtacggcaacggaatcagtgcttgttacagagctccgctcgcatacatcttcaaaactatatgaagttctccagaggaatagaatattcctcctgatgctatatccttattaacgcacatggcgaatttatactgagaaattataggggaacgatctcgaaaagtcaatgttacgtcccctataggtgtaaacgttttacagatgcgtttataattaagatgcatttccggcgattaccggttctgactccaaattaccttcgcttttcagctgactcacaaagttctccagaatctgtaccatctcgtcccgcttggttccttccataataacatccttgatgcgggcagatcctttcaggcctttcaaataccaagccagatgtttacgcatctcgcgtacggcaactgtctcattcttcaatgcgatcaggcgatccatatgcaggatggcaacacggatcttctcttcgccattcgggtcaggaagcaattcccccgtgcttaagtattgaatggtacgatacagcatccatgggttacccagggcggcacgaccgatcataactccgtcacaacccgtttcatccagcatacggcgtgcatcctctggtgtatggacatcaccattgccgatcactgggatagagacagcttcttttacatctttgatgtgtgaccagtcagctgtgcctgtatagagttgctcacgcgtacggccgtgtacacttaccgcctgtccaccagcacgttcaaccgcgagcgcattctccaccgcgaagatatgctcgttatcccagccgatacgcatcttgaccgtcaccggcttctccaccgcgtccacaacagcggataccatctcatagattttgttcggatcaagcaaccaacgtgcaccggcatcacatttcgttacctttggcacagggcatcccatgttaatatcgatgatgtctgcattggtttcttggtccacgattttggctgcttctacaagggaatcacgatctcccccaaaaatctgaaggctcagcggtttctcacgctcatctacaaacaacatctcacgtgtacgctggttgccatggacaatggctttgccactcaccatctccgcgcatacgagacctgttccgaattcttttgcgatcaaacgaaaagccggattacatacgccagccatcggcgcaagtacgacctggtttttcatttcaatgccaccaatgttaagcacggtagtcgttccactccttttttaattctgtatatatcacgatataaagttcgatcggtgtcttggttgttgtaacatgactaaaccgaaacggtcctagttgccccgcaactcctcgatactgattgccagcacaccagcaattcgatcgagttcttgctgtgataccttacggtttccccgttcaatggttcccagaatggccagcgagatgccggtctcggccgcaagttcatgttgtgttaaacctttcagcttccggaatgcccggattcggttggccaattgcatgttttccaaagctgtattccatcctttccatccagtacagacaacgatgagtgtacaaaggtatacaaacctgaaatctcgccctccggtacgatatccgacagtggtaccagtacaaaagcccgttctcccatgcggggatgaggcaattgaagcaattcggtatctcgcgtctcaccgtgcatccagagcagatccagatcaacggtgcgcggtccccagcgaatatcacgaacacgaccgagacggttctcgatatccaataattccgtgagcaactgctccggtgtcagcatcgcctgtacggcgactgccatattcagaaatgcaggctgatctacatatcctacaggctccgtctcatatagtgcagaacaacgcagaacggatatatgagggtgttcatccagcaaagacaatgcttcaaacagcgtctgttcccggtcacccaaattggcccctaaagcaatataagcctctgaagattcagaggtcgaatgtgcaatcatgatcggttctcactttcttgtgcggcgaagctctaccgttacgccctcaaaatgaatatcgaatggcggatgtggcttcgtcaccttgactgtcaatgcattgataatagtataagtgtctagtaaagaagatgcaatatgttcgcccaaagcttcaattaactggaatgacttattctctacaatctgttttaccagctcatggatctccgcataattaatcgttttggtcagatcatcgttacgtccggcctcacccagatccatatcaatctccagatcaatatagtaccgctgcccaagcttccgttcttctgcaaaaacaccatgatatccgtaatactccatacgatgcaataccattctatccatacgatccgcctaccctctatatatattgaaattttaatctatttgaagttatcccttagcttcgcctttgaaaaacgctgcgcttccactggacgggtcaccagggacccgccagcattatttcctccgtatacccggagaagcatacaacatggcatcacacatgtctgccgtccgccgaatcggcttcacatcatgaacccgaaccatctggcagccttgggcaatgccaaatgcaacggtcgcagcggttccttccaatgcatcatccgccccaacattcagggtgttctggatgaatcttttgcgtgaggtggctagcagaacgggataccccatttcattgagcaaaccgagcgatgacatgagcttcagattttctccgagatccttcacaaaaccaatgcccgggtccaggataatttgctctgctttcacgccagctgttaacgcaatctgtatgctctcctgcaaatcgctcacgacatcacccagataatcggtatagtttcgctcctgccgattatgcatcaaaatgatgggacaccccagttcggctgccgtgcgggccatatctggatctgccttggcaccccacacatcattaataatatgagcaccggccagaatagcctgacgtgcaacatcggccttatacgtgtctaccgatatcggaatgtgcggggcttgctgatgcaatgcttcaataaccggaataatccggctaagctcttcatcggcgcccacgacatctgaacctggacgggtggactccccgccgatatcaatcaggtccgccccttcctccatcatctgtttggcatggccaaccgcccgctccacgttggtataacgtccaccatccgagaacgagtcaggcgtgacgttaagaatgcccataatctgtgttcttgtacccagcttcaattcagctggcccccatgcatagttccgttcatagatgacaggtgtaagtgtcatgaagtataccccgctttctgccggtacatacccagaaggactgctgtaaccgggccaatatgtccgttgctaattatcgtttcggctccgtcctgatcccgcagagttgtcaccggaaccagttcggccaccgagccggttagaaatatttcatctgcttgcaggagatcctcccaggaagctaacgtttctatgcaggggattccttgctgcgaggcaatctccattaccacagctctcgtgatacccggcagaatgccggttgagagtgctggcgtgtagagaacattttcccgtacccaaaacacattgctgacgatcccttccgctatatgaccatcccgggttaattgtagcccttctgcaccctgcacatgctgcccgtatccattaagctcccgtttcgccagaatactgttcatgtaatgcagcgacttgaaccgaacttctccttcgggcgtgttgcgaggtgtagacaaccgttgaatcatttttccactctcatataaagagggagaaggatcaggtaatgcttttgccagtaaaatatgattcggcttcgaataatcaccagaaggtaagcctagcggtgcttcaccggctgataccgtgtatcgcacatacgcatcccgaagtccgttcgcatccatcaaacgttgaagcccacctgtcacctctgccgcggtcgttgtaaaaggaatgccaagttccttacaccccgaagccatgcgctccagatgccgttccaaaagatatgggacaccttgatacgtccggaacgtctcaaacagtccaagtccgtacaaaaagccgtgatccgttacaggaaccacggccgccgccatattgaccaactctccgtttatcgcggcatattgcatgttaaaccttcacttgttgggacaaaaagttacgaagcatctgatgaccatggtctgtaataatggattccgggtggaattgaaccccttcaatcgcatattctttgtgacgcagacccataatttcaccttcagctgtctccgctgtaatctccaggcagtcaggcaagctgctgcgctcgacaatcagggagtggtaacgggtagctgtaaatggagatggcaatccggcaaataccgatgtcccattgtggtgcatctcggatgttttgccgtgcatcatgcgctccgcacgaatgacattgccgccaaatgcttgtccaatggactgatgccccagacaaacaccaaagatcggaatgcttcccttgaaatgatcaatgactgccaagctaatgcctgcttcattcggtgtacacgggcccggagagatcagaatatgatcaggtgccagtgcctctatgcctgccagatcaatctcgtcgttgcggcgaacttccaccgtctcgcccagttcacccagatattgaaccaggttatacgtgaaagaatcgtaattatcgataaccagtatcatatgcctgctcctcctcatcttccgtcaatgcaagtgacggttgcttcgttttattttattttagtttagtttagttaacagcttctgttcttttcgcttgttcttgttcaatagctctgcttgcttccgcctcttcgctgtaattcacagctctcatcatggctcttgccttgttgcggcattccttgtattcccgatatggatcggaatcaataacaatccctgccccggcctgtacataaccaataccgtccttaatggcaagtgtacgaatgacgatgttcaattccatattcccactgtaatccatccacccgatggaacccgtataaggcccacgccgcacaggctcaagttcctcgataatctccatggtgcggacttttggggctcctgtaatcgttccacccgggaatgtcgcagcgatcacatcaaatacggataacccttctgccagcctgccttccacctgggaaacgagatgcatgacatgggaatacttctcgatggtcatcaattcaggcacatgaaccgaaccgtaggctgcaatccgtccgatatcattccgttccagatcaacgagcataatatgctccgcccgttccttctcactgctgagcagttcatccgccatagctttgtcctctgcttcatcccggccccttcttcgggtccctgcgatgggacgtgcactgactttgccattctccactttgaccagaagctcgggagatccgcttaccagttgaaagtctggactacgcagcattcccatatacggtgatggattcacaaggcgcagccattcataaatatgctcagcgctcgaatgaagccgcttttcctgtctcaaggacaggttcacctggaacacatcgccctgcctgatatattcctgtaccgtacgcacagcttgttcaaagtccacctggggaaaggaggtttcccatccttccgattccctttccgcatcttcaggctgcggggtacgattgacctgcttgttgcggcgttccagtgcctgttgttgttcctcagcctgtgcagcccccataatatgaagccaacgtttctgcatcgctgtcgctcgtgcttctgccgctgaatatagactacggatatcagtttcgttccggttaggctctatagccagatgaaccatgcagaaaagtgcctgctgctcatggtcatacgcccatatttcttcaaagcgcatccaccaataatccggcagagccgggttatcctcagccaaatctgggagcttctccaatgatcttgctacatcgtagctgagataacctgcgtatccacccccaaagtctggagccccattaaccttgggtgcactatacggggcagtccatctcttcaatacatcaagcggcttgccgctgtccgtcgaggtggctccttgcgtcacatcatgaataaccgcttcttgacccttgccggaaataacggatacggggtctaaccccagaaatgtatatctcccgcctttgccattctccagcacaattgcgtatggtgacgcctgcttccaggctgcctcccacgataacggtaaaccgccatgatacggtccctcatccgacttcgtgatatagggcatcatggtccagccttgttcagcccactccatccagtcggcgtatgttgtcatcaggtgtgtcattgcggtgtgccgccctccatctgtcgctagttctattgtctgatagtatactaaagcgccgccccttttaaaagcattacgccaaaaatcctccatacccgtcatacgggcaaggaggattggttttgtcatttgtagacttagccttcgaagttgtaaagaggtgtgctgaggtaacgttcgccgttacttggcacgattacgaccacgcgcttgccttcacccaactgtttcgcaacctgaagacctgcacggatcgccgcaccggaagaaataccagacagaatgccctcttccttcgctacctgacgagccgtctcgaatgcatcatcattctcaatgtgaatgatctcatcatagatttcctgatccagaatctcagggataaagttggcaccaatcccctggatcttatgtggtcctggtttgccgcccgccagaattggcgaagctgctggctcaaccgcaacaattttaataccagcaaaagcttctttcagcacttcgcctgtacctgtaattgttccacctgtaccgattcctgcaacgaaagcatccaacgtaccgcctacagattgaattgcttcaacaatctcagggccagtcgtttcacggtggatcttcacgttggctttatttttaaattgctcagccatgaaataggaagggttttctttcagcagttcttcggcttttttaacagcaccattcataccttcagctccaggtgtaagcacaagctcagcaccatacgcacgaagcaagttacgacgctccaagctcatcgtctcaggcattacaataacggacttgtagcctttggctgcagccaccatcgcgagtccaattcccgtgttaccacttgttgcttcaataatggtatcacctggttttagcttgccttctttttccgcttcttccacaatgctaattgcgatacggtctttcacgcttgaacctggattctggtactccagcttcacgaatacttcagcactgccttcaggtacgatacggttcagacgaacaagcggagtacctccgatgagttctgttacgttattaactactttagccatatgaatgcctccttagtggatgaataaaacttgagtccttttgtgcggccggtagcctctagctgttatagaagaactgcggaaatcctgttgatcctatcccttactgccaagatttctagcagggcggaggtttccgaaagtttctttgttcataaataaatcttttatatccgagtaaacgagtaggtatttattattttcatcttatcaacgttaacccttattgtcaatatgagtactcaaaaaaatactctgcctttggccctaagaccgcagacagagtatttttatcaagatgcagcagtacgatacaatctttgaattcaggaggcaggaatctcggacaggattacggcttcatacttgttacgcagcatttgctctacctgcggcaacggatcagcctgactcagagccagttccattcgaatctcctcacggacttcttcggccgattgcacctggcgttcttctttatcattaagtctgataataacatagccttcttcttccacttgaactggaccagcaatatcgcctacatccagcccggcagcaagttgaaggatttcttctgactggaatggatcattctgctcaatccatcccagcctcccaccagcatcacgagagaagctgtccgtcgattgactgcgagcagcttcttcaaaatcttgtcccttctccaacgcatccagtaaggaatcggcttcctcttcttccttcactacgatgatggacaagtcatatttctcgggggaaacgtaatcctcacggtgttcagtccagtaatgctcaatatctgcatccttgatctgtatgctaatcgttgcaattttctcaagcagcagcctgtagccggcttccaattcaagttcctgtttcgacaggcccaattgagacttcatttcgtcaaaatatgatttctctgaatcgtacccatccatcgcggcggcaagttctcttgcaatctcttggggagtgacgatcagcttgcgttcaattgcttcggcatatactgctttacggtttaacatctggagtaataactcactgccgtaacgtcgtttcagcgcatcggtccactctttgtccgtgataacttctccgttgatcgtcgctacggtgcttccttcttccgtattggcatcatgggatgcatctgcctcgtctttgccctgtctgagaccatgcatagccataaccgttcccataaccagcatgcccagcgtcaagacaattacggccgtccacaaccctttttcctgtcttgtcattccgcatcccgtccccgcatagatcagttcttggcttgctctaggatggtctcaagttgttctttgttaaagtcataggcttcattacagaattggcagaccacttcagcctggccctcttcttcaattaattgctccatctccgtttggcccaggctgatcagcgtcttctctacccgctcacgtgaacactcacagctaaaatgtatatccaatccttccatcacttgtacatctggcaacaatcggcgaagcaactcttccaattcaagtccctgctccagcaacgtcgtcactggcggcaacgtactaatggcgttttcgatcgccgtgatctctggatctgtcaatcctggcaacagttgcataatgaatccacctgagacaataacggaattatccgtatcaacgagcacaccaacgcctacagcagaaggggtttgctccgattgagcaaagtagtacgtgaagtcttcgcccagttctcctgaaataataggcacactgccacgatatggctctttcagtcccaaatccttcgttatgttgatgaaaccttccgttccaactgcgcctgcaacgtccagtttacccacactattgcttggcaaatgtacatgcggattagaaacatatcctcgtacttcgcctttcgcattggcatcagctacaatctgtccaatgggcccatcaccgttgacttgtaccgttaacttctcttcacctttgagcattgcacccataatggctgctgttgtaaccgtacgccccatggcagctgtagccgtgggaaacgtatcgtgtcttctgcgtagttcctcaaccagttccgtagtctggatagcaaaggctcttacctttccattcattgctgtaccacgaattaaccggtcatgcttgttgttgttttccaagtcattcagcctcctttggcgtatcgccataatagtcgtaacacagaaaaaacggcacaacacttaagctgtaatctcagcccgctgtatgccgtcactatgctcacctttcccggttccgctcatatataatacgcagcccttcaagcgtaagcagcggatcaacttcctctatactatgggtttcttctgcgataagtgtagcgagaccacccgtcgcgataactcggggcttcgctcccatctcctcgcgaatacgttctacaataccatctacctgccctgcatagccatatataatacccgcttgcatggcatgaatagtattacggccaatgacctttttaggtttctccagctctatacgaggcaacttggatgcccgctcatagagcgcttcagtggcgatctgaatgccaggtacaatagctccccccaggtagtgacctttctcgtcaatacagtcaaaggtcgttgcagtaccgaaatcgaccacgacgagagggccgccatacttctcaacggctgccactgcattaacaatacgatctgcacccacttcacgagggttctcgtatcgcaggttcaagccagttttgataccaggcccaacgagcaaagcttttttgcctacatacttctcacacatcgcttcgattacattcaccagtggcggaaccacagatgagatgatgacaccttcgatgtcacttgccctgatgccggacatatgaaataaattataaatcaatacgccgtattcatccactgttgactgacgtgatgtactcagacgaaagtggtgcagcaattcccggccttgatatacgccgagcaccatattgctgttccccacgtctacaactagaatcaaagaggttcacccctctttcttttcatttaaatccagactaatatccaggctctcaaaggaataggttaacctgccaaccgaaattacatccacaccactctctgcaatgccacgaatggtctgaagagacacgttaccggatgcttcaaccttcacatgaggagcctgttcacgaataagttcaaccgcttcacgcatccgctctggatgcatgttatccagcataatgatatctgccccggcttgcaaggcttctctcacctgctccagattttcagtctccacttcaatcgtcatcgtatgtgggataacggttcgcgcacgctgtaccgcctcggtgattccgcctgcacccttgatgtggttatccttaatcataacggcatcgtacagtccaaatcgatgattcgctccgccacccacgcgcactgcgtatttctcaagtaatcggtggcccggcgttgtcttacgtgtatccacgagcctggtctcaagaccatccagcacatccacgtaggcacgcgtacgcgtagctattccggacatacgttgcagcaagttaagtgccagtcgttcccccgtaagcagtgaatgtgtacttccctctacctcggccaaaatcgtgccatgggtgacctggtctccgtctgttaccttcggtgtaaatacaagatcaggatcaacgacttgaaatacaagtttagctacggtcatgcctgcaataacaccattgtctttggcgtgtataatggccttggattggttgcctgctggaatcgtcacacttgttgtaacgtcacctgcaccaacatcttcacgaagccagtttttgattgattcgataagcccttcattatatccattcagtatcatgacatcaattcctccacaatcgcttgttctcgctgctgcagactatgcttctgccacacgatatcatcacgtgccgggaaatcctcacgatagtgagccccccgactctcctcgcgatgtaatgcaccgctggtaactaaccaggcacaggtcagaaggttggcatactccagctcttccttatgcgtgagtgtctgatcaaaaaattgcaattcctgtttcagcttgtccatggccttctgcaggtcctcaccattccggcgcaagcctacctgacgaaccatcattttctgtaatcgtaagcgtctttcggataccggcttttgttcttccgtgatcttactgatctttttattcatgtccacagatgaaggcgtagcccctcttgcttgtaataaaccaagcggagggagagattgaatacgatcaacaattctccgcccaaatacaatcgcttctgacaaggagttgcttgccaaacggttggctccatgcactcctgtagaagacacttcaccacaagcgaataaccgggagatgctgctctctccactaagatccgttttcactccacccatcatgtaatgggcagcaggcgcaacgggaatccagtccgttgtcatgtccaatccataacgcatacaagtctcatatatggtagggaaccgatgcttgatcatctctggctgttcatgtgtaatgtccaggtacacaaaggtactgttggtagactccatctcactaacaatcgctcgtgccacgatatcgcgtggggccagttcaagctgggcatgataacgatccatgaagcgctcacccttcacgttgcgcaaatatgctccttcgccgcgtacggcttctgacacaaggaaacgcggggccccagggtaacatagagaggtggggtggaattggataaattccatgtcacgaacaatagccccagcccgataagccatggctacaccatcggcagtagctacatccggattcgtcgtgtatcggtacagttgtcctgccccaccagagcaaagaacggttgcctgtgccttcacaaacacttgcgatccgtcatccttctgaaccagagcgccaatgcattcccctcgctctcgatctgtaatcaggtcaacaacaaaatgctcatcccatacttcaatcccaggatgttcattcacttcaacagcaagcgcacgtacaatctcatatcccgttgcatctccgttggcatgcaaaatacggcggtggctatgcgcaccttcctgcgtcaacgccaactcgccgttctccagatcaaataaagtacccaaacgaatcagttccttcactccgtccggaccctcattcaccaatacctctaccgcttcggagcggcataagcccgctcctgctacaagtgtgtcctgcaagtggtaagcaggcgaatcatcctcagcaataaccgcagcgatgcctccctgcgcatatctggtgttactttcaagtaatgacttcttcgtgatcattaatacacgttgttgttcacttgccttaatggcagtaaacaaaccagcaatccctgagcctataaccagtacatccgtctctaccatgggtagcgcagacagatcaaaatcaactaaatattgcggtatcatgttattcacctgtcttggagcaagagtagcgcatcctattttaccaacaacatacgctctagtgattctctggctttgtcggcaacggccggtggcacgtagatttgcggcttcatcgtttccaggcatttcaccagtttcttcaagttgttcaccttcatgttgggacatacgaggaacttggtagcaaagtggaactgtttatccgggctatccagacgaagctgatatcctgtaccatcttcggtacctacgataaattccttcgctgatgaatttttgcaatactccagaatagctgttgtactgcctacaaaatcacccatttctacaacctcagggcgacactctggatggacaacaaactccgcattaggatgcttggctctcatctccaccacatctttaactgtaagcatatcgtgagtgttgcagtaaccttcccagataatcattttcttgtctgtatgctgctgcacataatgtcccaggtttttatctggtacccagataatttcgtcggaatccaccgattgaataacccggactgcgttcgccgatgtacaacagatgtcagtctctgctttgatctcagccgaggaattgatatacgtaaccaccttggcattaggatgttgtgcttttaatttgcgtagtccatccacattcaccatatctgccattgggcagcccgcacgttcgtccgggataataactgttttatttggcgcaagaattttagcgctttcacccataaaatgaacaccacagaaaacgatcacatccgcatcggtttgtgctgccttctgggctaacagaaacgaatctccacggaagtctgcaacctcctgtacttcgtcacgttgataataatgggcaagaataatggcattacgttccttcttcaacaccataagccgctcacgcagctcgcggttcatctcagccttgcgctctaaagccagagcttccacctgtgatcctctcctttatcgggacagcgtcatgcgctgtttcgtgggctaacctaagtcgttatcttcgcttgagaaacgaatcacaagcggtttaacaactaatttacacaacgttcacgactctgtcaataaatgaaaaaggcccgggacagcgctgtaaccacctgtttgctaactggttcgccatctaactcccgtttatctttatctatcctcttttaaaataatggataaaaaaagagagcctcgagggctctcttgatttcacctgctatcatagccagatgtattgtgtattaagacgttggcttagttccgccatcatccgggttattgttattacccttttccagattcggagcttcgtttggaatatctccggctggtggctcaggcgtttcatctttaccttgaatacgaacacgcacatcaccgatggtgtcgatgattggctctccgccttcagttggtgtgccttcaccatcattgtcattctctgcttttggagtcaaagaacctgtttcgatcaattgcttgatctgatccatttccaaagtctcaacctcaagcaaagtttgagcgatcaggtgcatctcttttgaatgtttaacaagcaagtctttacacttctcataacagtcattgataaagcgttgcatttcctgatcaatctcgtaagcaatggaatccgagtaattctgttcatgaccgatatcccgaccaaggaatacctgtccttgtgaacttccgaattgcataggtcccaatttctcactcataccgtattccataaccatgctgcgaacaatacctgtcgcttgctggaagtcactgtatgcaccagtaccaatttctccgatgaacaattcttcagctacacgacccccgagaagtccggttactttatccagcaattcctgcttggtaaccagcatacggtcttcttttggcaacatgattacatatccacccgcacgtccgcgcggaataatggtcactttatgtaccatatcagcatgttcgaggaagtatccaacaatggtatgacctgcttcgtgataagcaacgattcgtttctcgcgatcactgatgacacggcttttcttctccgtaccaacaataacacggtcaatcgcttcgtcgacttctttcatggaaatatctttacggttacgacgtgctgcaatcagcgccgcttcgttcaagagattttccaaatctgcaccggagaaacctgttgtacgtttcgcgataatatccatcttcacatcgttggtcagtggtttattacgggaatgtactttcaggacagcttcacgacctcttacatcagggcggtcaaccgtaatttgacggtcaaaacgtccaggacgcagcaaggcagggtccaaaatatctgcacggttcgttgcggctatgatgataataccttcgttaactccgaatccgtccatctcaacgagcaactggttgagtgtctgttcacgttcatcgtgaccaccaccgagaccagcaccacgctgacgtcctacagcatcaatctcatcgataaagatgatacatggggcatttttcttcgcattttcaaacaaatcacgaacacgtgatgcaccgacaccgacaaacatttccacgaagtcggaacctgaaatagtgaagaatggtacacccgcttcaccggctacggcacgagcgagcaatgttttaccggtacctggaggccctacgagcaatacgcccttaggaatccgcgcacctactgctgcgaatttacgagggtccttgaggaagtctacaacctcaacaagttcctgtttctcttcgtcagcacccgcaacatcttcaaatgtaacccgcttcttctcttcgttgtagagacgagcacggcttttaccaaagttcattactttaccgccgccgccttgagcctgattaaacaggaagaagaacagcaggaacataatgatcaaaggaataaaggaagtcagcaacgtcaaccagatgctgtcacctttcattggctcctgatgatattggaaattgttagtttcacttgcagctacaagctcactaattgcctcatccgtaggaggaatatacgttgagaaattttctgatttggcgccatcaggtgccttcttgtattgaccggtcacgagatacgtttgaccgttgaattgaaccgtcaattcagagacattgttggctttgatcgctgcacgcaactgatcatatctaggattatcggtggcttcgccgccattgctgacgaactggactatccccaccacaactaaaaaaagaatcaaataaaaaccagaattccggatgaaccgattcatcccctacctcctctcgagacactttaattattttaacatagcccgacatggcttctcaacagaagccaagaacagctcaaggcttgggtcgggcaggatattagctactatagacttccggcttcaaaatcccgatatagggcaggttccggtacttctccgcaaaatccaaaccgtaaccaacgatgaacgcgtcaggaatgtcaaagcctgtgtaatgagcttccaactcaactttacggcctgaaggcttgtcgaacagcgtaaccactcgcaccgactcggcaccgcggttttctagcagttcaatcagatagctgagtgtaagtccgctgtcgataatatcttcgacaatcagaacttcccgtccttctacggatacatccagatccttaatgattttgacaacacctgatgacttggtggaagcgccgtaactggataccgccatgaaatccatttcaacaggtaccgttatgtttttaaccaaatcagccataaatataaacgcacccttgagcacacaaatgaccaaaggattgcgatttgcatattcggcacttagtgttgcgcctaattccttgactttactctgaatttcttcttcactgatcaatacttcctgaatgtcgttctgcaactgtgcgaacctcctaagttatactatgaaagccttacctgaaccataaccactacccctgaatcgctgaatcgcctacagtcatgtacaggattgcggaagtgccctccctgacaggagccacattggaccgtcgaacacccggtaaccagatgatatgacctgctccatcacataccacaggaatacgtggacggacagatggggggattttctcatcgatgaaaatatttttcacctttttgcttccgtttaatcccatcactttcatggtatctccaggtaaccgtgaacgcacaaccagcggcataagcagttgatccgcatcaaacgcggcttgatccgccgattccggtacatgatagtcctcgggactcaccgtcatcaaccgaatataccggttaattggggtgagtgaaagctcataagttccactccattgcgcaagacgatactcgtaagattgatcctgtacgtccgtccgtatgccaaaagaaatcagattatactcccgagtgcaggcgagtgtctgtcctatatccaggctccaggtcgtcacatgggtctccatgaccttgcgccgaatggtttctatacgggtaaagtcgacaaaatcactgtccaaaggcagataattcaatattagtttaatcaaccttcgttgtaaagcgacatgtaacttcaagaaggaaggcacctcaaaggtttgccttccgccgttcacctgcactagacacctgtatgtgtcatatgcactctgctccatgaaatcgtcttcatcacccacaatttcggcaagccgattcaatgacggcgtgagttgtccattatactgccccaaaaaaggaagcacatccaagcgaatggcattacgccgatatttacgcagggcgttgctctcatcattgaaatacataaaaccctgggtattacaagcttctacaaggtctgtcttgtttatacgaaggcatggacgaataagttccacatttttttctcgtcttttaaacttcattcctgagagtcccgacaagccggttccacgaagcaaatgaagcatgaccgtctctgcctgatcatccgcatgatgtgccaaagcgatgcttgctgcattatatttggaagccacttcatgaagaaaggcatatcgcttgttgcgggctgcttcctgtggtccctgacccgtaagctccatatatgaaggtacatcggccttggtccattcaaatgtaataccaagctgttttgccagttccatcattttctccgcttcatcatcagattcactccggaagccatgatgcacgtgggcacagatcaattcaagtggcacatgccgcttgctaatctcgtgcatgatatgcaaaaaagctaccgagtccggcccgcccgatactgcgacgacaatccgatccccgggaacccataactgatgctcttccgctgcatccagcacgttcttcaccagcatgttccagcgtaaagcctccatacctgttcctcattccttacgttatgtatatgcactctcacagatcagaaaagtagtgcatagatgagcactccaataagtaatatcacagatacagcaaatgcgtttttaagccagcgcggtgttgtacttttggaacgacggcggagaggcgtggggcgtgccatcatttccttccacccttgtgccgcatggcctgcatcacgaaactgacctcgtaatgcctgagtcgtccaattgcgaaaaggacccagtcgttcactgcgctccaccagtgctacgagctgattcacacttcgcagttgcggtaatccttcggctgccagtgccttgagcgcgtctgcttcaagtacatgaatcaacaataatgcaaatgcaaatacatcataggtaccatctgccgtacggctacctgcattccagaaaccccgatcataccattcagtgaactgtttgacgcttcgaccaatcgacgtaactccgccgtagtcgatcaattccacctgcccatagtcggataccaacacattctgaggtttgagatcaccaaacacccatcccgcctgatgcaattgtgccagcttctgcaagagtctaagtcccaccagaagtgtccagtctgtcccctgacgccgaataaagtgatgaagtgcctcacctctaacgtaacgcatcacataaaagggaatatcccggccacgaacggcataatcatccacatctttaagataggaaggaatgccgctctgccgaagggcctcatgattacgctgtagttgaaaagatttgagtacattgacttccgattgcagatcaaccggatcaaatcccatttttagcgcgtagtgtttgccattttcaccccgttggacaagaaaaacgatgccattagctcctttgcccagtagcttccgaatcgtgtaacgactgcgattccatttccctgtaaccactgttcctggcgggaaagaggcgtcagacaacgttgtcaccgagcatcccttctctttcaatgcgatagttcccttctatttcctgctgtttctccagtgtaccataacggtaaaaatcaatcaccttctgaattgcaggacctgtcggcgttgcacccttcatctgcaaccttccaaacaaggaccgaacacggcctggatccgttgtccagtcaatatccattaccgcatcttctccactgtgtcgtcccggaaaatgaaatacggaaagcttgctttgacctatacgcgcctgcaaactcaacattaaatcgcgaatgccttcttctaccgcagccagtttgggcttcatactggcactgacgtctattagcaatataacttgtaaagctgtagtttcagccatatcatccatcacttccacgacccgggcgcgttgtgcaggctccagatcggttaccgttttgggctccttctctcccaaaatttgtgttaactctctattaaccgcctgttgaatggtctgaaccaccgttttccttgtcatcatctgcatcgtatgggcaagctgccgtgtacctacaatttggctgattccacctccggctctggcaatatcctcaatctcccggctacccagctcaccaatggttccataatcaatcacgccaaccacattaaccgtaattccctcttcctgcgcttcggccgctgccagcaccggacttggtcctacattggaacaaccgtcggtgatcaataagatttgcttcatccgatatccctccgttattcgttactctccaactctatgactagcattgccagaatgaagagacttcaaacagaagaatatgcaattaactcacagttcgtgggcgctccatccggttgatgccaggcacacgcagtgtggcccattcagggcggaaatgctctacttttccaacaacgacggtcatatcatccaatatctcatgctgctgatatcttatgacactttcaagcaggcaatcggccaaatcttgcggatcatctgtatcaatctcttgaatgagccgtttcatccataactctttgttcaccgcataccccggtgcatcatagatgccatccgtcatcataatgaggatatcccccggttgtagctgtaccgtcaccagatccacttcaatatctttaataataccgattggcaaattactggcagaaacctgaataacctcctgtcctcgtttgataaaacttggcgtcgatccgattttcataaacgtggtctctgccgtatattcatcaatcagtgccatatccacagtggcatacatctcttcaggggagcgcagcatcagaacggagttcacggatttgatcgccagtttctcgtccatgccggactgtaacaactgttccagtatgttcagtgccgcgctgctctccatgcgtgcccgttctccattgcccattccatcactgagcgccactgcaaatgtaccattgcctaactcaaccgtactgaagctgtcgcctgacatcacatctcccccttttgcggcggcagcaacacccgtggttacctcgaacgttttggccgaaccaaacgtgacggttgccagtccctgacgaggatcggtcaaggtctcatgcaagacggcaatatgctcgtccagtacatccgaaatcagcggagcaatcatttttcggcactcatcgaatccacgtgtatatgcatgtacaatctcaatctctacattgcccgcttccagattgatgatctcaatggagtgaatggacaagcccagtgactccagtgcgtcccgaatctgctcctcctgctgtaccatctcatcactttcccgctgaatttctttggccaggtcctccatgacctgagatacaccggacaattgctctgcaaccagctgccggctatcgataatttgacgcttccattgcatgttatgttgatgcagtccatactgggcacgcatgacttcaaggacctcttccggtttcgcacataccctgttccagtccactggaatctgcttgcctgagatctccgggtttccttcaatcgtactcatcacgtccgtcatatatttgtaggtttgaataaacttcgcatcccagcattgtgtacgcttgaagcagcttgcacatgtgctctcggcaaccgcattcatgaaatggtccattccaccttctttctgtacctgctcccctgcaccggacatctgatcaaagctacgtgacaattgacggaatacctgtgagaaccgggttacccgttctgccgtgatatcccgtatccgtttggcatactcatgctgcgatttggtatgatcctgcgtacccggtacatatttggatatcgccgtcatcaggcttttaggtgttaacatgaatagtacgatagctgcacacgtctcccataatgagttcatcacatcgcccggtcctcccagatatatggatagaatggacgaacccagcagcatgcccagtgcaaccgccgcacgtttgccttctcgaagcatacccgccagcatcccggcaaaagcaagcaggctcatctgatacaccgctgacatgtcagcaagactcagaatcaagccggtaatgaccccaactgaggctccaaggggggctccgcccaccagcgcaaagattaatatgagataacgggagagcatatgctcgacggataaagactgaatggtccaccctacggctcccgtcataacggaagcgagcaatatgatcaggcagaggatctcctcgttctttaggctgaacttttttttgcggtaggtgaagatcggtatggcttgtataaaaacaagggtgagcacgaaacttaataccgaatccatcgtgagcatcagcatcgcgtaccagctgaaggatggtccaatcacaaccgcgaataacttgaccataaatgtagtcgtaaacaccatcgttggtgcataagataattcagcacgatcatatgactccagaccgcggaagagcagataaaagatggcgatctccgatgcaacaatgagtggtaccggaaacggtgcaaagagactgcctgcgagaagtgcagcgcctaccggaatgatgtaatccctgcgcatgaaagcaattacggcgaagtaagcaatggcaaagggagataactcattcaggatcattgcctttccgagcaggaaccccataaacgtaagcagcagtacccatttgcgggaagcaaccatctggacagccttgcgggagccaagccattgtttcagacgtaccgacagctcctcccgagcttccgtacctcctttacctgctttcattcccggaaattgaatgacattccacttttccatcatcctcaaggcaccccattcgattaatttgaattttcgtgtttcgttctcgatggttctgattatagatagattagaagacgtagtttgtcagaataggtgggcagggtccaaaaagtttacgacaaaagaaacgagcctggcgcggtggagcgaaaccccggccttattgtggtttcattcattctcctacttgattccgacaatcggaatgtctgattttgaaccgaagatggtttggtctcgccaccatttgagcaggataactgtggaatgccacggaaacctgtcggtaaaaaatggtagacgacaaatgttcttatggtttcattttgccgtgcagaaaaactggggatatggagcttcaccttacaaaaaaagctattcaactacttatctgtgaaagaaacgcaaaaaaaccgttagcccatggctaacggttttacttatatgtttagatcaggttgtgacagattacacacgcttggctccacggcctccgcgtttgccttctgtgttcttcttaagcgaagagatccgctcttcactatctttcaggaagcgtgacattttatcctcaaatgaaggtttgcctgctgcgggcttgaaagaacggcctccgcggtcaccacggttaaatccaccgccgccaccaccacgaccttggccaccacttgggcctccgccgctgaatcgttcgcgatctcctccactgcgttccggtctaggagctctcgggggtctagattgggtttgttgctcaaccggtttgtcaacagcttgcttaatggaaagtccgatcttgccatccttgtcaacgttgataaccttcactgtaacgaggtcattcagcttcaggtggtcgttgacatctttgacataattgtcggcgatttccgagatgtgaacgagacccgtgacacctcctgacagatccacaaatgctccaaaatgcgtgattcctgtcaccttgccctctaacttggtgcccacttcaattgccatagaataaaatgatcctcccttaaaaatatacaacccgattttttgaatgccaaaatcaatgctgcgctaatgtaattataccttatgccataaaccaaggtcaactgaacactaccccatcagagagcctattttttccggtttaacggcttcagacacacggataacaaacctagctcggtaatagaccgaattccatcagttccctgactcttcaacctggatcggcgtttcctcaggaagataatatccttttttccgtgccagctgtcctatgtattcagggtcattcaaccggctgacttcgtacttcaactgttccagcttcttcaacgtatctttctttgaagcttgctgagtggccagatgagaactcttgtccgaaatttgtgcattctgcacaaggaatgtatatcctgcccatattacaaatacaatcataaacgtcatccaaagcatgaggcgcctttttgcaccggcagattttccttggttagttggagcctttgatctgcccacaggtgttttacccattacggacctccttaaaaccagcgtttccacatcgctgcaattcttgtacccacacggatcatgaagcgtggcgttacccaatgtttcaggagcggcctaaacatccagcggaacaacttgccgaaaggtaccaaacactgcagcaccagcctgcccaggaataatagtatcgcaattacaaaaccgaataatacgcgaattaacttataaattcctttagccggcataacgatcaggatgttaaggatatgtccacaccaatgaatcagcgttcttgcgagtttaattaacattaccacaaaacgctgggttgtaacacttaaaagccaaaaatagaagcaaacccctataatcagccccaaaaagacataaaaccgcaactgtccgtggtttccggcgtatagcatccgaaaaacgaacagcgcggaagcaacccagtacaacagatcgagcgtgtgtatactccatctcggaaaccgcagctgtccggacagtacccggtaactgtcgtaggccattcccatcacgacccccgaggtgagcatccacatcagtgtgatccattgagtatccggactcatcggaacatcttgccaaacaggcctttaccatttttggactgggaaccggggtccagatattggagcgaactgactgtgccttcaatggataacagaccttcctccaggctcaggtttttgatatgtaaattgtgcccccggatggtcagatgcccaagttcagtctgcagcaaaaattcctcactgtcgaagctctccacgttggagacacccgtcagatccagcagtttccgattctgcatgctcagatgatgctgtttggccttaccgtgctcaaccatggcatgtacccctccttcttacacctagcttatggatgtggaggttggaatagaaccagcgttgttgaacaaataacccggcatccagtaaaaacaaaaacgcccttccctgttacaggaggacgtttcgattcaacttgcattgaatgaatatttaataccagatgtactgttaccagttcattccgttatccttggcgatcggctcttccttcaccaaggtgtagaggctgctcgcctcatccttcttggtactctcggcaattcgttccaccctcacagtgaccagtttctgaccgaactgaaccgtcagctcatcgcccactttgacagcggcgctgggcttagcttcacgtccgttcaccagaacacgtccctgttcagagacgtccttggccacagtgcggcgtttgattagccgggagaccttcaggaatttatcaagacgcattattttacggcttctttaagtttgttgcctgctttgaatgcaggaacagtggactcaggaatcacgatttcattccctgtttgtgggttacgtccggtacgaccggaacgtttgcgggtctcaaaagtgccaaagccgatcaattgtactttgtctccgctggcaagtgcatctgtaatttctcccaaaaagccgttcaatacggactcaacgtcttttttagtcaaaccacttttggttgaaatgttgttaatcagatctgttttgttcatttttaaaagcctcccaaattgaaaaaaaagtatctgcgattcctgacaatacatcgattgccgctgattcgcgttaggtcactacacatgtattctggcttggcatctgaaatcctgccttagtccgcgactttttttagctttttgtcgatggtccgcaggcaacagtctaagaccagtacccgaaaccatccgtcgctaaacaccaaccccagtttacacagatgaacacatgttcgtattatcataacacactgcatagcatgaatggaataaggttatctggcttttcccagaaaattgaacctgttataatcctgccttcttcgcatcctgccagaattgctccatctcttctacattgctttctgctggtgttcttccctgttcgcgaagacgctcttcgatgtactggaaccgcccgatgaacttgcggttggtcgcagcaagtgcctcttccgggtccgtatcgatgaatcttgcaacgttcgcggctgcgaataataaatcacccagttcgagcttccgttcttccgcagactggccttgttgcaccgcttctttcaactccgccagttcttcctcgatcttggcaaacacaccttcaacatcatcccagtcaaagcctactttggctgctttcttctgtaacttgtatcccttcatcaatgcaggcaagtcacgcggtataccatccagcacggaaaccttctgctgatcctggcctttgcgcttcttctcctctgccttcatctgttcccagttctgaagagcttcattcgcatcttctgcctgattatcgccaaacacatgtggatggcggaagatcagcttatcattcaaaccttcgatgacatcatacacattaaatgtacccacttcttcttccatctgggagtgcaataaaatctgcagcagcaaatcacccagctcttctttcatatggtcggggtcatcctcatcgatcgtctcaatgacctcataggtctcttcaatcaggtttttgcgaatggactgatgtgtctgctcctgatcccatggacagccacccggactgcgaagaatattgacgatctcatgcaaacgcgcaaaggatctgcgacgcaaggcatcatcggtgttctttggtacatagatcagtgacagatttccgtacccttcgatccggtccagttcgtgcaatggaatcttgtgaatgacctcctgaccctgcacccccaacgcatgacccacaaataccggataatcatccgggtaaacctccatcaggcatagcttcacatccgaagcagtgaacacatcgtagacttgtccgatcaacgtatgtagctgtggttgtaccaattccgtgttcaggctgctggcatccagaagttgaaacccttcaatcgggtcgaatccaagccgtataaaggcttcgtccaggaagctctctccgcccatgacacgcagtgaaatgcccatctgcggacaacgttctttgagcaggcgtacacttgcttctgctaccatcggatgaccgggtacggcatacacaatctccgttccggcctcacccttgcgagcggcttctatcagttggttcgcgatctcatcatatacttcggggaaggaagactttgcctcatagatgccatcaaatgatgtcatctccagcccctcttgcttcagatcattcaatacgggatgatccagggtacgtacatacagcgtagctgcatgtttcatttttttgataatacctacggtcagttggtctgcatctccagatccaagacccactacgtttaaagctgcactcattacgtaaacctccatccggactatcctgttgcaagcttacaattattgtacctgaacaggactaattacacgtattataccagaatcattcaatatcctataattgcatattagctgtgctgggtgtagaagcaccgtgagcatgaagctagcgcagcacacgcagtctgcccagcagcttggcaaggcgaggccccaacttgggcacagccgccagctccgcggcggtcagtagccctgtccgggccgccgccagcaagaacacggccgagcctgcggcaatgcccagcaggctcacgcccatcgcggccagccggcggtcggccgcgatacccatgccgccgagcacggcttcggcggcccaggcagtgcctaccgccgccagactcatggcggcgattaccagcgccggcttcgccaggacggcgccaggggcagggcgcagggcgacaagtcgcgccagcagcgccacattcaagccagccgccagcatgtaggcgactgcgcctgccagggccgcgccgctgatgcccagcgccggcacaagcatgacgttcagcagcgccttgacgcctgcggcggccagcatgctgaacgcgggtgcgcgcacggcgccgaggccttgcagcagcgccgccgcaataatgctgacggtgctgcccgcagccgtcagcgccatataccgcagtgcttcggtgcctgcggcatctccgtacagcatgcggttaatcggctccgccaacaccgcgagacccgcggatgccgccaggccgatcaaccagaaccagcgcagcgcaaggcctgcttgctgccggacggcttctggcccgccctttaaccgggcttccgccatcgccggaataaacagcacagatagtgacgtagccaacatcgtcaccagttgaaccagcggcaatccacggttgtagatgccgaaggaaaccatcgactgaagctcatccagtccttctccccgtagcaaccggggtacggtgaaggtgtccaccagattcatcagcggtacagccagcgacccgagacagacgggaatggcgtacatgagcagcgtcttgatccactcaccattggatcgtgatctttctgccagagccgggttaatagcactcaccgttttcttcagcggcgtaaccggtgtattctcctggcgctcatgatgatctgatccaacctctccgctgttactgctccattccgaatccaattgttcggtgacgacttccctgcctttccgccgatgacgtaccatgtaacctaacatggttaacagtccaaccattccaccagcaacggagcccatcatggcgccagcggcaatagtctcaagcgaagcgtcccgtctcatcaaccacagaagcagaacaatcatgacggtgacacgtatcgtctgctccaccacttgtgataccgctgttggaaccatctgctgtaatccctgaaaatatccacgcagccctgtcattaccggtacgaacaataacgcccatgaagcagcacgaatcgatggaaccacatggcggttgccaatcatgtcagcgatcagcggcgcacctgcatacatcaaaagcgccattataattccaattcccccgagcagtagggaagatagtcgaataattcttctgctctcgtctggtcttccgagtgcgttctgttctgctacgaatttggatacggccagcggcagtcctgcagcagcaagcgtgataatgagcatatataacggatacaccgtattgtagatgccaaatacaccgtctccccccagattctgcagcggaatcttctgaaaagcaccaatgattttagagataatggcagcaagcccaagtataaatgcaccctgtagcagccttgagcctgtagacggctgtttcataagtccctcctgcgtaatccttttaagcataccttgctattatacctgcctgaaggcacacagactaaccctcccccatcacaatcatccgaattaactttgttgtcccttaaaatgcaaaaactcccgtatgcccaagacagggcaccaggagttgatctgcggtctattgttccatttgcttgccaaggaaaccagcagccgtctcagacatcttcacttccatctgagacatcttaactgattcgtccttattgaacagaataaccgttccgatggggtcaccacctgaaataatcggcgcaataacaaaagaggataacgtctcgtcatgatctttgctaagttcataagaaccattgtttgtttccagaatggtcttcctgttttccatacaaccttccaacagttgacccacctgcttgtccaaatattctttcttggagccgcctgccaccgtgataatggtatcccggtcagaaatcatcgttacatgtcctgtactctcatacagggattctgcatattctttggcaaaatcaccaagttcgccaattggcgaatattttttaaggataacttctccatcacgatccacgaaaatttccagtggatcaccttcacgaatacgtaacgtacggcggatttcttttggaatgaccacacgaccaaggtcatctatacggcggacaataccagtagctttcatttcacatgttgccccactttctcgagaagatttttcaactactgttccttaatgggtagaggaaagtcccagaacgtttagtgtgatatcttgaccatagtattcatctgttcccatttccttatacatgcttcggagaatatagttgtgtaactttcgaagaaggcgaccatgtacccatatgacttgaatatataaaagaagaagcaagaaggaggtcctaagtcctccccttgcttctctgtatggttgtccatatttacgaagtacaaggcattcattcgggcgaatttaacccctgaacgtatgctaacacagcaattttaccagcttacttgctgcttgtaccttcatctgtagttgcatctttgtctgttccagtcgtaccttggtcagtcttggtatccgtacctgtggagtcatccgtttttggttcggttgttttttctccttcagttcctgtacccgtagtgccttcagttgtgccttcagtcttaccttcttcagctttttctgtttttggcagtttaacttcttttacgattttgtccaattcattttgcatgaacgtatcgatttcggctgcagccaattggctcttcagactttctttttgttcagccgtcaatttggcaaagtcagcttctgtacgagcttccactttcatgacgtggtaaccgtactccgtctctactggatcactgattttgttcagtggcaacgtttttgcagcttccttaaatgcctctacccagctgcctacaggtgtattttcatacagtccacccttttcagcagaacctggatcttcggaatatttttttgcaatttcagcaaaatcagctccgccatccaacttggtttttacttcttttgcaattttaagtgcatcttcttttttacgctctttttgcgtttttggatctgtgaagttaatcagcacgtgacgaacggaagccgttgtgaactgatctttgtttttctcaaactcagccttgattgcatcgtccgtaacgcctgtttctttatctttgattactgtcatgatccgagtcatgtagtctttaatgttgtcgtcagtcagtttctgagctttgagcatttctgtccattgatctgcctgaacagaagctttcattttatcgaattgctcagttgccgcttttgtacctgctgttttggcttcttcacttgctttgccactcagatattcataagcaacttcctgtttcaccagatactctttgaaatcgtccatatccatcatttgtgcatactccggatagaggaatttcatgacacgttgctccatgtcgaattcattggctgtaatagtaccaccatcatacgtagcgactacagcacttgtatccgtcgattcaggtgtttctgcttcttccttcttgccacatgcagcaagcagtgataaggatagtactgcaaccatgctcacagacagtacttttcctacttttttatactttggtaacatcctttagttccccctttgatttaaaagcagttttcatggactccagaattttctctaccagctccatcagttgcttatccccaagccccttgccttttgcgtgaatcagcatatggggtccttgttcaaattgtacacgtctttcgaactgatttccaatgtgcgcgattttcgagagttcaaaggcatgttcacgcccttcatagaacttcacggtaatgtcctcaccacgttgggaaatggactcaataccgtagattttgccgtatactttcatccgcgcaacagccagcaagttaatgacggcttccggaagatcaccgaatcggtcaaccaattcgtcttccaattccatcgcatcgtcgaaagatgcaatgaccgccacttttttgtagatctcaatcttctgaatactgtcatagatataatcggacggcaagtaggcatcgatactgagatccagcgttgtattccactgatctgaaggtaccggctcctcgccaagcatcgtaactttgcgtttgttgatctcctcagcaagcatctgggaatacagatcaaacccgacggaagcgatgaaaccatgctgctccgctcctagcagatttcccgcaccacgaatcgacaagtcacgcatggcaattttgaatcctgaacccagttcagtaaattctttgattgattgcagacgtttctcagcaacttcagtaagcactttatcccgttggtacgtaaaataggcatacgcaatacggttggaacgacccacacgtccgcgcagctgatacagctgggaaagccccattttatccgcatcatgtacgatcagtgtatttacgttcggaatatctaccccggtctcgatgatacttgtgctcacaagcacgtcatattcaccatccaggaagtccagaatcgttttctccagctctgtttccgacatctgaccatgtcctacaccaactttggcttcaggcacaagttcagaaatttcggctgccatctcctggattccctgaacacggttgtagaggtaatacacttgcccaccacgggcaagctcacgctcaatggcttcacgtacaagcgcctggctgtgttcaaccacataggtctgcaccgggaaacgattctctggtggagtctcgataacggacagatcacgcacacccagcatggacatatgaagcgtccgcggaatcggcgttgccgtcagtgtcagcacatccacattggttttcagcttcttcagtttttccttatgggttacaccgaagcgctgttcttcatcaacaatgagcagtcccaggtccttgaacaccagatcctgtgacagcaatcgatgtgtcccgataacaatatccactgtgcctgccttgatgcctttggctgtttcattctgctctttacgggaacggaaccggctaagcacatgaatgttgaacggataaccggagaagcgctcacggaacgtctcaaaatgctgctgggccaaaatggttgttggcacgagtacagccacctgtttgccttcaatagctgctttaaatgcagcccgaatagccacctcggttttgccgtaaccaacatccccacacaataaacgatccattggacggttttgttccatgtcctttttgatttcttcgatcgcacgcacctgatcacgcgtctcatcgtaagggaacatgtcctcaaactcctgctgctccgcggaatccttgtcgaatccaaaccctttggaggtctgacgctctgcatacagcttaatcagatcatcagcaatatcctgtacagatgtgcggactttatttttaacccgtgtccactcattgccgcccagcttgtatattttcggttctttctcttcggaaccaacatatttctggatcagatcgatctgctcaataggtacagacagtttgtctccacccgcatagagaatatgcatgtagtccttatgaataccgccaacttcgagggtgccgatccccaggtacttaccaatcccgtggttctggtgaacgacataatcgcccacttttagctcgctataggatttgatccgttcagcattatctacattccgaatcggtttgcgtactttacgctgtttttgcgagaacatctcgccctcggtcacaacagccaaatgaatggacggcatttcaaatcccgtttgcaaattaccgatcatcatctctggctctggaatatcatagtccatcagtacccggcgcatccgctcgagtcgctcctcaccgttcgccagcatgagcactttgactccggccttctgccaacgctccatctctgccttcagtacgttcatctgtccatggaaatcctgcatgccacgactgatgaagttcagaatgttttgtggttgagtgtgtggaacttggcgcaaaaagatcgacataaacagcgtctggaatggacgctcatacaggagttcatcaccgtctgcggataatggaagatccggaagtgtttttccgttttgcatcaaatgtaggttccactctgattcatcacggtccagctgtttcgatgtctccgatagtctggcaggctcatcaagaaccagcagggtatcttctggcatatagtcgtagatcgttttgttctccggatagagcggagaaatatatttatacatttcggagaaatacacgtgttcccgcaaaagctcgatctcccggtgaatttcctcacgaagacgcagcttcgcctgccggtccgtcattttctccagctgttgctccagcaaaagagcagccgcatcagcagccttttccatacgttcacgatctgcaattaactccttgcatggtaaaaccgtaatttcttcaatccgttcaattgaacgctgatccgctggatcaaatgtccgaatggagtcgatctcatcatcaaataactccacccgatatgcgatcgatgaagtaaccggatagaagtcgatgatacctccgcgtacactcatctcaccacgagattccacgcgttccacacgctcgtacccgagctttaccatctccagcaggaaggagtccagttgaagtgtgttaccctgtttaatcaaaattcgagcattggccatcacttccggaagcggaacataacgtcttaccccggaaaaaggaataacaacaacgcccctgaatccctgggcgcagcggaccaacacatcaatacgctgacccaatgtttccgggctggaaacagcagcttccgcagcgacaagttcgttggcaggatagatcaacacctgatcaggtgaaagcgcttcctgtaaatcttctgcaattttttgagctgaaaacatattatgtgttactacgagcaatggtcggttcatttcctgatgcaaggcagccagcataatctgacgcgccgagccggataaacccgaaaccaattgttccttcatgccggacttgattccggctgtaatggatccgaagtctggatctttggaaaaagcctgtataagtgcttgtaacaaaaggggcacctctcttataacttacttgattatctcacgcatacgcgtagcatcactattaaaatggatacaaattcctttttgtcctgtttcatcatatcggattactcgcaacattgccacatctgttgacgcggctgagcctgatttcgagatagcgatggctttcatgccaactgaaaagaagcctcagcaggctgccaaggctataaaaggtggagcgttattacgcaaccgccctcaactgtcattcgatcctgtacaggcgatgtctactgaagcggactcgcgagcaggctaagctccggattgtgctccagggcttccttacagtaatcacatgtaatccgaacggtaatgtcaccaccggaattatacgctattatatccctccgctcgtcgggggtcaagaaatgaaagccgagctctacttccgttatccgggcagaatcgattcgtccaataaaggtacggcaatgcctacatacgtaattcactgacatgtttatgcctcctgaacatggtttatacatccagtatgtccagtatggctgaatcgaacccgtctttatgatcattttaccagtatgtcttacaaaattaaccgttaaacttcgccattgtttgttcaaacgtatgagtcaagctatgctccagggcatcacatgtttgctcaatggtctgatcaagggcttccttttctttcttcataaatgtcgacagtacataatcaacaatggcatgtcctggttcaggccgggatattcccatgcgcacccggttaaactgctgtgtaccggtatgctgaataatggacttgattccattatgtccgcctgcactaccttggtaacgcaatctgactttgccaatctctgtatccatgtcgtcgtacacaacaatcagatcttcaagactaactttataaaaatccatatatgctcgaaccgattcaccagacaagttcatataggtcattggtttgatcagtacggttttcacaccgccaatattgccttctccaatcagcgctttacatttattctgtgtaatggagatattatgacgatcagccaaccgatccagtgccataaaaccgatattatgacgggttttggcatagttcgagcctggatttccaagtccgacaatccacttcatcttgttccctccttcggattagcctgaggtgaggcatagacttcgaatcttatatttcatataatatcaagaaagtaaagatcgatttactgtagtgttcacagttaatattttatcgacccaggaaggtgagcgggttttgcgcgaagacaatggacaactgactcaacatagcgattttatctatcatctcgaatatcacgtacctgtacaggtatacgaccgcgacacccatattgagattggtctaatcacacgtttcgataatcaattcgtcgaaattgccgacacgctttttcatcggcgtcgtttccgatttatctcccgcccggggtattagctgaccagcgtctgtttcactcttaataaaacggcacgccgacaggggttacattttccattgaaccggaaaacgtaacccctctactactttatgcagacatccttattcaatttcaaacagcttgctgattgacaattcctcatgaacccggataatcgcttctccgagcaaaggcgctacagacaacactttgagtttgcttgtcggattagcatgcgtaattggaatggtatccgttacgatgacttccttcaatggtgcattctccaaacgttccatcgcaggtccggacaataccgggtgagtacagcacgcgtatacttcttttacgccgccttccatcagagcattcgctcccagtacaatcgttcccgccgtgtcaataatgtcatcgatcaggatggctgttttaccttcgatgttaccgataatgttcatcacttcgctcacatttggctcaggacgacgtttatcgataatcgccaggggtgcattcaggaaatcagccagtttacgtgcgcgcactacgccaccgtggtcaggcgacacaacaaccggattttcgatctgtttcgaccggaaatattgagccagaattggcacgccgagcaaatggtcaaccggaatgtcaaagaatccctggatctgcattgcatgcaagtccatcgcgatgacacgggttgcacccgctttttcaatcaggttagcaaccagtttcgctgtaatcgggtcacgcgaacgtgccttgcgatcctgtcttgcatagccatagtaaggaataacgacgttaatcgtcttggcagatgcccgtttgagtgcatcaatcataacgagcatttccatcaggttatcattaaccggcaagcaagtggactgcacgatataaacgtgacaaccccgaacactctcggagagtttcacttgaatctcgccatcactaaagctggttgtgtgagattcacccatagggatcccgatataatcagcaatttgatgggcaagcttggggttagaattgcaagtaaatatttttaatttcgaatcaaaataagtcataaaataaaaaccctccgtgctggttcattggaatcaataagcgtctgcgacatgtcggcacctccccgatcttcgggaggcaatcttgttatcaaaaccccttattggggtttggcattttgtttcttggctttagcacgtccgcgaatcttctccgcataaccaggtttattctcctgacgtggacgagcaatggccagatcattctcgggaacggaatgggtaacggtggagccagcaaccacataagcgccttttcctaccgtaatcggtgcaatcagattaacgttgctgcctacaaaagcatcatcttcaatcgttgtcacagctttattataaccatcataattgacagttattgccccgcatccaacatttacgtttttccctactttggcatccccaatatagctgagatgagatactttggaaccttcatcaattgtagcatttttcacttcaacaaagtcaccaatttttacgttgcgacccagtttagtccctggacgcaaattagcaaatggacctaccgttgcatcagaaccaacctcggcattggatactaccgaatgtttaatcgtaactccgtcctgaataacgctgtcttccacatctgcctgaggaccaatatgacatgcttcaccaatggaagttgtgcctttgaggatcgtccccggatacagaactgtatctgatccaatcgtaacatccgctccgatatatgtcgatgacggatcaatgattgtcacaccgttcaacatatggcgtacggcaagacgttcacgcatgaaggcttcggcttgcgaaagtgcaagtcggtcgttaaccccgatggattctgcgatgtcatccgacatgtaagcttcaatcacttctccatcattgcggaaaatgccaactacgtctgtgagataatactctccctgagcgttctggttcgtcactttttccaaggcagcgaacaattttgcattatcgaaacagtatgtgcctgtgttaatctcattcacagcatcttcctgctctgtgcaatccttttgttccacaatccgttgtacagatccatcttctccgcgaatgacgcggccataacctttgggattgtccaactgagccgtaagaactgtggctgctgctccgctgctctcatgcaacttcatcagaccttccaacgtctcactggtcacaagtggtgtatctccgcagaccacaatcgtagagccagtttcaccgccaagcaaggatttaacctgcttcactgcatgacctgtacccagttgttccacctgaagtgcatactccgctctggaacccaaaaatgactgcaccgcttcggcaccatgaccgactacaactacactgcgttcaacgcctgcgctgagtgctgcatccagcacatgtccaaccataggtttaccgcatacgggatgcagtactttgtacaattttgatttcattcgttttccttgccctgcggcaagaacgattgccattcgtttcaaaattaacgacctcctgttctgaaaatcccattgaaatgcattgctgatatatatccaatgagtatcgttcagccggcttcaagccggtcctgttcatcgcctgctgtctctgtaatcacacgtaacaacgcggacaccaacgaatcgtgacctatatgtatacgccgtgtacctgcgagcttaaccgaatcccaataattcctaagatgccgccctgccaccaagcgcacgatgcgctttttgttctctgctaataaactcaatactgaatatatcttattccggtcaaaaagaaaagagagccataagacatggctctcttttccttcgaaccccaataatgttctcaggcaccttcttcaatgacttcttcctcagttgccgcacgatcgtattcagtcaaaactgctgcctgaatcttctcacgcgtaccggaagagatcgggtgggcgatatcacggaactctccatcaggagtacgtttgctcggcatagcaacaaacattccgttgttaccatcaatgacacgaatgtcatgaacgacgaattcgttatcgatggtaatggatgcgatagccttcattctcccctccgagttaacacggcggagtctgacatccgtaatttgcatgtgtgtgttcaccacctttttccatcagaacttggtgtataattccacacagcatatacgaactccttctttttataaccacaaaaatttcctaatttcaggaatttttttatttaatacacaattcgacaacgttcatgccaggtcgatggaaaagaccttttaacgacataacattcgtcatctttctacaggtcaaaatagttgccaggcttgacggaaatctgtctgctcttggcatcaaccgctgtcagtttcgccagagatacgtaatctgttaacaggcgttcttctgaatctacagaaccagattccaccagtacccctaccccggcaactgtagcattaaactcggccaaaagatcgatcattccttgcaccgtacccccggccttcatgaagtcatccacaataagtactctggaatgctcacgcatcgccctgcgggacagggacatggtatgcagacttttgtgggacccggatacataattgatacttacggccgatccttctgtagcctgatggtccctgcgtacgagcacgacaggcaggttgagctgggctccggtcgcataagccaatggaattcctttggtttctaccgtcataaccacatcaatattcatattgccaaaggccgttgcaaaaatcttgccggcttcattcatcaatgcgggctgaccaagcaagtcggacatgtacaggtattctccaggcaagatccgatcaggttgcgcgagctgggtcgagagccgctccgcaaatgccaatgccagttctcgggataccttcggaatccatcttactcccccggctgctccagccagtgtatgcagttctcctgacccaccttcttcgaacacttccttgataatcgccaaatcttcactaattgaagactttgcggcaccataacgttctgcaaatgtggtcaacggaataaccgtatgcggtctggacaataagtattgcgtcatttcaaccagccttgcgcttcgttttaacttcttcacagagatccatcctcacgatcacggaaacatccaaatccgaataattatttaagaatataacacctttatacgtgtttgtacattataaaagcgaatttcacgtcaacatacgcacagcgtaaacttctttacagaacccacgcagaccattgtatatccgggcaaccttggattctttggaaaccaggccaaataccgttggaccgctaccagacattaacacgccgtctgcacccaatcgaatcatggcatccttcagatgctgaacttccggatacagcttcaacgttacatcttcaagcacattgcccatctggtcacagacttccgtaaatgattgattgcgtatagcctgctccattttagttgcactcggatgacgaacaatcttgtcactgcggaaccttccgtacacatcagctgtagacacattaatcggaggcttggccagaattacccagcactgcggtggattaggaatgggagttaacttctcaccacggcctgtagcgagtgcagtccctcctgtgatacagaatggaacatccgacccaagttcagccccaagctcctgaagttcgtgatccggtatattcaaccgccatagacggttcaatccacgcagcgttgctgctgcatcactgctgccgccggcaagtccggcggcaactggaatctttttatccagatgaatatggacacccgtacgcacgttatagcgctccttaataagtctggctgcctgaaaagccagattcttctcgtcgagcgggatataacccgcctgactggagatgaaaatagtatctcgcggcagctccgacatttccagccgatcagccagatcgaccatggtcatgatcatttcaacttcatggaatccatcgcttcttttatgtaaaacgtccagcatcaaattaattttagcaggcgctttttcgtaaattttcaaggcgttcacccgtcctcaccttttccctaagacaacttaacatattatatcaaaatggggctgtcaagtcatttgtattccgcatctaaggggaaaaagcggggttgttcctgacggatttccccgcttttcagtctgcttgaaacggattaagatttgcgcgcagcctgttcagcaagttgaattgcacgttttaccatgtttcctgcatccttggctttaattccgccccagccttcctgttgcacagtatcatagaagcccagatctttcgcgagctcattcttcagatcctctgacatgacacttcttcttctgcgactcatgaaccatcctcctccaaagtatccttcataatgtgatgagttcgttgttcgttcacgttttggacattttgtcaccaggccatattcagtttcctacattgcttaagaaactgtcccttcacctgtccatatagtatgccgcgaccgttcctcgctcattcctgagtatgtatgggttacgttagagggagaattggtgtttaaagaaaacaaaaaagcgatccgccttgtggggcgaatcgcctgtaaatcgatacttacgtctccatataggagctatgcgtctggctgcccgggtcataaaccatgacttccaccgattccgtaagtatatccgcataactataagatactcgcttgaaggtttcttgctcctcatcaagcttaacaataaaaacagaagggtacgtttcttccaatacacccgtacgctcaatggtcttacggcggccaccattagcccgcaacataattttctgaccaatatgtgcatcgagattgcgtttgatatccaacagcgtgtttttagccattgtcgacgaccacctcttttcttgtccattataccggattttacagtcattgtcaaatcaaaactaattattatatcagcatcaaaaagttgttgtcaatgaatttttttgcaaacaaaaaaagccccaaattgggactttaaatggcctacatcagactgccgacgggttcacttttagcgtagataaatcattcagcccaggcagacctacccggtaactcccccgtgtctcgacaccacccacaccctggctaccactgatggtattgtgcagaacatcactcatgttgaccgtatcgcgcacagaggtaaaggaggccttggctgccacatagaccggatcaagtgcatgaatgagaattctgcctggggaactggcaaagttcgctccagcgcgcagcagtgcctcaaaatgggactgacaggctcctgccacaatagtgagtgcgtccagatggcgttcatattgtctggccacctgaatggccgatacaaaattttgcgaattcttgtagctaccaagactatataagtcatagggctgacgtgtctttagcaccccatcatgacccgtaataactacgatatccggacgtactttgggtaataagcggtataaggtatctgccattgccgattcatggacatactgtccctctgcgggcacacgaagttgctcatagagatccatactttttttcaaatagttcggatctccatccagatgaagcacctttccaggcatttcaaaataagctggttcctgctgggcagaccaatcctgtaccagaccttcacgattccgctcagcctgttccatacgattctgctgcagacgggacagggtctgatgtgctttaatatgcgcctgtctggtcttggcgctttgtggttcgtagggaacctgtatcaaatcgtccaccggggaatcggcaatcagccggaactcagtccctttaatgaccgcagcatccaactggaggccttccacccgaaaagtcacatcgccgccgtatgacttccgaacgaccaagtctccgatattcatcaacgtaatcacctctaccccatcgtatgggcagagacccggtttggttcattcaaattttacagcgctgcacgtacccctgcttcccacattacggtgctgagtgtggcatactcttgcagactcaacgtctctccacgccgggacggttgaatacctgcctgctccagcagaatgtctgcctgttcccggttctcctttgtgaagaaacgtgccttcaagttgtttgagattgtttttctccgctgggcaaaagaagcctgtaccacttcgaagtagtgtgcttcatccggaatctccactggcggctgctcacgcactttcagcttaatgacagctgattccacattaggttgcggaatgaagaccgtaggaggcacaatacacacaagttccggcatactgtagtactgaactgcgatgcttagactaccgtagtcttttgatcctggtgcagcagccatgcgttcagccacttctttttggatcatgacaacaatgctgtctaccggcagcttctcttccagcagtttcatcatgattggagtcgttacataataaggcaggttagctacgacactgactttgtccacggatgcaaaatccgtattaaacaactcagccagatcaagcttcaacacatccccatgatgaacacgtacattcgaataaggctgcatcacttctcccaggattgggatcaagcgctggtcaatctctacggctgtgacgggaccggctacccgagccagtcgctccgtgagggctccaatacccggcccgatctccagtgcgcccttggactcgtccagatcggctgcattaacgattttgttcagtatattttgatcgatcagaaagttctgacccagacttttcttaaatgagaatccgtgtctttgaataatctctttcgtacgcttgggcgttgcaatttcaatcgtctcttccatgttcttcatatgctcacaatccttcacgttcaatttgcgctaatgctgtagagaattcttcccgtgtaatctgaaatacactgagacgtttgtggaactgcttcccgttacaataaccgatgcccagcagattgcccatctccatgcgacgtgcagcagcctgcggatgcacgataagtcctgccgcgatcaggtcctcccaatcgatcaggctcggagcaccttcgtatgaagtatgtacgcgcgccagagcatgacggatcgcctctggtgaggcattctccaccccaatgtcccctttgcgcgttgcatcggcttccggaatgaaggcatgcttgcagcctggcaccttgttcgcaataatttttcgaatgcgttcgccagcatgatccggatctgtcagtacaatgactccccgtctctcctgagcaagcgcaatccgcttcagaatgcgttggttgatggctgatccacctgtttctatggtatcggcctccacggcccgacggatagctaccgtatcgtcacggccttccaccacaatgacttcttttatcatgttccatttcttcctttctaacgcaaaaagaagaggaatatcctcttctctgccaaacggcgggggagactgaattcagactcctccgccgcatattccgcatgaatcattcatgcaactattttatagcattcccatttcaaagtaaaacgattttagttcgcttccggcttcaccggaccgatcacgtagaccgtcttgcctttcttacgtccaaaattcagggcatgcttcacactgtcataatacacatcaattttgttgcctttaatggcaccgcctgtatcttccgcacgacggaatcccagaccttcgatatatacccaccagccaattggaatgactttgggatcaaccgcaatggtgcgtccttccgttacacgagtaccggaagctgttttagttccaatgccaggctcttcggaagagtaggcagtcatggatacatttttaagtactttggagtatttaaaagaagtcccggatacggtaatcactttgctgcccgaggcagatgttttcttcgagttcgttgttgtagcctttttggttgttgacgtttgagccgatacggtctgaatctcaggttctttcacgaccggttttgctttggtgccgacagcgatcactttatctacacgattattcgcgacagatttgccgaccatttttttggagaccaattctccatcctgaaataccttttcgatatgctgtacaattgtgccttctttgccgttcacaacgacacggttatcccctttgtacaagctagggtcagccgttttaatgactttgtaagcgatcggttgctctacgtccactgtacgctttgttacgcgcactacacggatcttcatctccgctttgatcgcagttccaagcgccggatacactttatcattactttcaacttgaatacctgatttttgaattgcatcttctaccgatgaatcggttgtatacagagtcttggtgtctccgtctgccgtaatgttaactggaacggcccgctcaataacgattcggtctccatctgttaacgccccattcatggacatggataccttatcgtgagggctgactgtgatcgactgctcctccagcatttcctgaagcattcctgtacgagtctctaccacctgagctttgccatcaataaccagtgaaatttgtttcccggcctgaccgtaaacgactaacaagatcatgattgtaagcgcaattgagaaaatcgcgatcaatgccatttgacgcatgttctcatgcttccaccgcaacgcgaaagacttactggatgatcgtgactcatgggtctcttctggttggaatgtgcccacttctccgtcctccttcatagcctcgccgtctaaagtaatgcatgatgtctttgacgtgactataccaaattttctacagaacacagattggaccaacataatccggttctgcaccatgaatcaatcttcgcaacatgatgtcatcctcctgaatacctaccgtatgatgacaatatttcttttattcaaaaacaaaaaagccaaagaaagagtgtaagaggaactctttcgtggcttccgaatgattttgaatatcggaaattcatgcacgaggttgcctctctttttccgcttgcgaggttagctgtcgggttcgggcgaaagagagccgccctatcttgggtcacccgctcatggcggacgcccttgaattcaccccgagacccaaagaagaaatcaaatacggcttcgcagttcccttcgctgcttttgggtcagcgaacgttgcgcatcggccaaatacaccgatgtttaagccctattggttcccccgctctccgttaacggagactcagcgagactgattcatgaaagtaatgttgtttcatcggaaagtgtccctttgttcatcccccgaacatctgtccagttttccgcacaacaattcactgaaaagatgatatcctgttttgatgcatgttgtaaagcgttgatcaagtacgtttttctgaatatttggttaaaatattgtaatattcttgatttatttggatcaaagggcaaattacctccgcttacctgcctttttcacctcatttgctcgtttttttaacgaatcccaaatcgttccatggcatttttggttgttattgcagcaatttcctccaccgaaatgcctttaatttccgcagctgcctctgcaaccagacgtacatgcgctgtctcatttcgcttcccacgataagggtgaggtgtcaaatatggagcatctgtttcaatgaaaaaccggtccataggaaccttctccaacacctctttaggctgctttgcatttttgaatgtgatcggtcctccgaaggagaggtggaagcccatatcgagacaactttttgctgtttcccagctgcccgagaacgagtgcatcacaccaccaacttcacccgccttctcttcacgcaaaattcttatgatatcctcatgtgcatcccgattatggatgacaattggcatgttcacttcacgcgccaaagcaatttgttgtcgtaatacgcgatgctgtatctcttttggtgaagtatcccagtgataatccaatccaatctcaccaatcgcaaccactttttcatgcttgcataaagatgcaatccactccaaatcgccctcctgcattgtgatcgcatctacgggatgccaccctacagctgcatatataaagtcatatgtttcggcgagtttcattgtggttggaatcgtctcccggttaaagccaatgttgatcatgcgaccaactcctgcatccacagcacgctgaatcatgtcctcgcggtcctcgtcgaattgtggtgcatccagatgtgtatgtgtgtcgaacagcatcatgtctgtatctcccttcatgtcgaaataacgactatcttctttttcaaaatccaatttgtaaaattcaataattcaatgactcatacataaaacattttgggtatctgtgtattacatcattacgtttgtttcttcacaaatacaatatatagaagatatacggatattctgatctatatattgttgattgtgctcattctgtctacttgcatttacaaaattatgtcgatctacatatactccccattaaagcagattactgtatcatggaaaatagctcttttagaaagtgttttgatatcgaaattcttcatcggattatacccacacgattacaagaaataggggcgtatatgtgacggtaattcgtgaataatcgcatccaccttgttttgcgggtaatacaaatgatgtttccctcggtgaagcccactgatggaacggacaatgtcagatacttctgacaactcacgtaaattgtcctgtcgatccagaagaagaatctgcttatctgtggattcatccggacgaaacacatcatacggattatccgaaggaaaatcaatttcaagatcgtattcgggatcgaggccagcctgtacaaaagcttcccgaatctcttccatcattgtcaagtcgacctgttcaagctctacatacttatataacttgcgatccataaaacgttcgcataactcactcagaacagtatcgtcctccttgcgccactgcgtaaatgccgtctgaattaatgcttcatccaactgcaaatattcattcacggataattctccttcaaataattgagggagtggatcaatcatgaagcggaattgaaaaccatgttgtaggagtgttttcgctcgcttgaatatttgccgcaatataatttcagaactacgagttaccggatggaagtaaatctgccaatacatctgataccgagacattaggtaatcctccacagcatgcatgcctgactccttgactacaatccgcccatgataaggacgcagcatccgaaggatacgatcaaggtcaatcgtgccgtaatttacacctgtaaaataggcatccctgagcaaataatccattcggtctgcatcaagcggactggtcaccaagttcaccacaatcggcttttcatacgttttttgaatgacagacgctactttctcaggaaaatcaggagcataccgtcttaagatcgcccctacttcggtatcacctgtaataatgcgacaagtccaatcttcgtgattcatgtcaaaagcttcctcgatggagtgagagaatggcccatgcccgagatcatgaagtagagctgcacacagagctacaatcttttcttccttcggccaatccgaataatgacttctttcaaattgagagatgatcttgcgtgtgatctcataaacacctagtgaatgtgagaaccgactatgctctgctccgtgaaaggtaaggtaagaagtacccagctgacgaatccggcgtaaacgctgaaattccggggtgttaattaactgccatataaccggatcttgcacgtggatataattatgtaccggatctttgaatactttctcttccgttaaacgttgttccatgtcgactcactcctttaatttcttttatattaacgctttgagctctgcgattcacctaagattcgacaccatatgacgaactttgtcgaatgaagtagttttgtcgttttccaaatcgacaaagctgacattgaggtttaaatgcgaaaaatggcttccaatcccttaccaccagtaaccttgtgaaaaacagccttaattttaagctaattttaaggttgactgatttgggaatcgttggtatgatgagtatcataaaacataaaataatgtcgaataatgacaaagatagttagctgagaggagcactgattataatgatgaaatcaacaggtattgtaagaaaagtggacgaactgggacgggtagttattccaattgaattgcgccgtacgctcggtattggtgaaaaagatgctctggaaatctacgttgacggcgagcgcatcatgttgaaaaaatacgagcctgcttgtatcttctgtggtaatgcagagaacgttacttacttcaaaggtaaaattgtttgtaacgaatgtatttccgaaatccctgcacctgtgacaaaataagaaaaaccaggtatactggacttatctaaattgttatttctaacctttttaatattccttaatgaccttcccggtgtgaaccccaccgcggaaggtattttttttccttgttatgggttccattacccaaaatgattctgtcacacgcgaactgggagagaacgatgaaatttgttcggaattttttttagccactctgctctttttaatattccactaaggttggatataagcttcttttcaggttatgttccccacaacagaagatatttggttagattactactcgattaatgcattatatacatcacgcttcgccagaccgcgatcggtagccgtttttttcattgcatctttgcggttatgtccttcaccctcataatggctgacatgatccgcgagtgacatgagctgccaccatgcttcgcgctcagccttacgctcctcttccttaatgccttctaccagcaagcagtactcgccaagaggtggatgttcttcaagccagtctatgcattccctcacagtaccccttgcgaattcctcatgacgcttggttagttcacgagccaggacaatcgagcgatcacccagaatttcttcaaggtggactaatgttttccgaatacggtgaggcgattcataaaataacaaagtcccgttggattcgtcaaacgcctccagcacttttcgcatgtcctttttctcacgcggcaaaaaaccgccgaatgtaaaacgctccgtcggtaatccggacacgatcagagcagacaacgcagcattgggccccgggatgggaatgaccgttattccggcttccagtgcaagctgtacaaggtcagaaccagggtccgaaatggctggcaaaccggcatcgctgacgagtgccaaattttttccttctattatatagcgtatcagttcaggtccactcgcccccttattatgctcatgataactaaacagcatggaaggtgtaatttcaaaatgggtaagcagctttcgggtctgacgtgtatcttctgctgcaatgatgtcacaactctgcaatgtcttgatggcacggaaggtcatatcctccagattaccaatgggtgttccaaccagatagagcttgcctgatccttcaggctgctccgcatagcttttttgaatatgcaaagtcatctaaagccctcctttcgtagtacgctcagcatgttgctgaccatagtaaatatccataatctcttcgcagtatttcccctcttcattgtagacaatgagtggaggaagcatcctaacttccggtttaccatctttcattccttcaattaacaccatgttggcttccaaatgagcacggggatgtaccatccgaatccgttttggttccagcttatattcgcgcatgagcgagataatctctgcaaggcgttgcggacgatgaaccattgatactttgccgccattacgtacaagtcgactgcacgcctgaatcacttcttccagggtacatccgatttcatgacgtgccattgcctgatgtgtgttcatcttgagatcactgccattcagaggcatgtatggaggattaaccgttattgcatcgtatacagcatgtcctgtttctttcacgagttctcgcaaatcaccttcacgaatcataatcgactcatccaatgcatttaattgcacactgcgacgcgccatatcagccaaacgtggctgaatctcgatcccttccagactagcctgcgtacgcgttgtaagcaaaatgggaaccaccccgttacccgtacacaaatcaagtatacgaccccgtttaggtacggaagcaaaccgggctaataatacggcatccatcgaaaaactaaacacttcatcactttgaatgattctcagatcatgagagagcagatcatcaatccgctctgactcatgtaacacaacttcattttcttccatatgttacgctcatcctccggtactctatatctcatgtttgtttagtttaggtttataaccttgaaaaaaaaccgtaggggatccctacggtcacttcatttattcaaaaaagacaggcagaacagacaatcgccttccgtccgcaaatgtccataatagacgttgcagatatggaagccttcgtgatacaaccgagccagattatcatacccttcacccacaacatcctcgcctgtagccggacctgctggtcttgctacaggagcgagtgctgaggagatcggcagatctgccggagcctcacgtttgagcagtttgcgtaactgctcattctcgatggtaagccgctgattatcctcaagcagctccttcacaatcatttttaactctcctaaatcaccgtgcaactgacccagttgggtttccatttcatgaatgtgcgtaaacagatttttcttttccaagtttccaccccgaagcaacctttatggtttacttgataacgacgtcatccagcggaagttctttgactttactgatgtcgaacagttgaacatggactgtgcggctaccggcattaattccgacaacttttccttcacccaatgaggtgacgaccaatttgcctaccgctggcagttcttctctcacactttcatagttatcatgctcaaatttcagacagcacatgagtcttccgcacaaccctgaaattttcgtcggattcagtgacaggctctgatctttagccatcttgattgataccggctcaaagtctcccagccaggaagaacaacacaacacacggccgcaaggtccgattccgccaagcatcttcgcttcatcacgtacaccaatctgtctcagctcgattcgtgtccggaatatgcttgccagatccttgaccagctcccggaaatcaactcttccttcagctgtaaaataaaatataattttattgcgatcaaacgtaaattccacatcgaccagcttcattttgaggccatggtctttgattttatttaaacaagtaccgaatgcttctttggctgcacgtttgttctcatcaaccacacgggcatctgtatcgcccgcaacgcggatgactttcttcagcggcaacaccacatcggactcgcccacttccttcttacctacgacaaccttaccgtactcaaccccccgcgctgtctccacgataacgcagttttctttctcaatgggaaggtccaggggatcgaagtaataaattttgcccgcttttttgaaacggacacccactacactgtacaaaaaattaacccccttgtaagccaaccccacttcgtctgaagccccgtcttcttagggaaccggccgaagttataaccgtttgcatatgattggagctaactttgccctctcccagtcttatgccaaaccgatcaaaaattgctccagacaaagctggccattgacgttgaaacgcaatttttttctgcatgctgcggccatatccatataggagacccactgctctgtgctgcgggtatgtgccaactgagataacatgtctaactgatctataaaaacgatatgttcatgcctatcgtactgaacatacagcatgtccctaaaccatagatggaacaaactaagcagcatgtccaggtgttcagagagtccggttttaaaaagcttctgctgtgcagagatcaatgatgtacttcctctacccagggactccttccctaattgtaacattacgtttctaatttctgcaaaccaattctgctggagaatttctctacatgcttccaatcctgacgctaaatggacggcagagcgagccagattggcagggtgcccttcctcgatcagagattgcagcatctcttccggattcagtgcgctaaacggtaccaattgggagcgtgagcggatcgttggcaacatggcctgtccattatctgtaatcaggatgccgactgctggtacctgcggttcctccagaaatttgagcaaactgtttgctgcctgtaccgtcattttctcggcttgttctataatatatactttgggatggcctgcctcggatcggtatgaaaagatacgctgcagatcccggatttgatctattttaatgttgtttccatctggtgcaagcatggttagatccggatggttaccatgatctaccttacgacattcaagacactgcccacaagcgtcatcttcaagctctgtacagaatattgccttggcaaaggtaattgccgtcttccgttgcccgctaccagctggaccgctaaacaaatacgcatggcttattgccttacgtctcaaactgctttgtaacattttcttggccgcttgttgacccataatctgttgaaaggacatacttcctcctcagaagcttaaattaataagcatcccccgaatttcccctacttgttgtaatagagagatttttccttcttctgtatccagcaattcatcagccatggataacagagcggagtcaatttcatcaatcagcttataccgcttacctctgccacgacgatcccaaccccttgtctctttcatggatacaccgcgacgaacggtctcttccaggaaccttttaacaagttgcttatacgccttcagttcacgaatcgtcatggaacgtgccaggcgatctccctgaagctggatttcactaaaccggcgattcagttcagcttgtgaggcccgttccccttggtgattcatcatatcagagaaatttttggattgaaccggtttggaacctgaatcagtagaactgatcccgctctgaatcggtctgaatccaggattgattttcatggatacgcccgctttctatcatagttagccaatcgcccatcagcacagtgcgcattgcgcctgtgcgtgagaatgaggcttttatatatgctgatcacactctatatataatggtagatacacatcaccatcaaggacttgttctttgtagtcaacctctttccgaaatgaaccattccccagctggaaatgctcatccggaaagagtatgctgattcttctcgtcaagaaaggcgttccgtaagtggcacgcacgaacgctgttaactcttcttgcatccatcgtttccaacatgctatcaatcatgaaggaccctcatgggatccatgcaataggtttaattagaaatgttcgaagcgatctaccgggagaacaaatacagtagctccgcctacttgaacttcaacaggtagcggcaggtaagagtcggttgttccactcatcggtgtgaccggagtcacgagctgttcacgaaccttacagctgctgcgaatgacgttcattacggattcgacttgaccatcatcgacaccgatcataaacgtcgtgttgcctgccttcaaaaatccgcccgtactggcaagcttcgtcgcccgaaagtttgctttgaccaatgcgctggataatcggttgctgtctttatcctgtataatcgcaacaatcagtttcatcctgcataacctcctttagaataagcacctttatcaaatgccctgtctatatattagacaattactcgtcaaaatccttcaaaatccctgtctccagcgacaaaatcattgctgccaagacatcctcctgcttcatggaagcatcgataactctgatccgttccgggaactgctcttttaataggaagtaaccctctcgcactttacggtgaaactccagattttccagatccagacggttcacttcgcggccatcatgagcatcgatccgggcaagccccacttcaggctcaatgtccagatataaggtcacatccggcatgagatcaccaatcgcaaaacggttaatggcccatacattctctatcccgagtccacgggcgtagccttgatagaccagactgctatcgacaaatcggtcacagatgactgcttttccagctctcagcgcaggctctactttctccgccagatgctggctgcgtgcagctgcatacaatagcgcttcggttcgagcatccattgccgtatgaagagggtccagaataattgaacgtattttctccgcaatctcaattccaccaggctctcgcgtaactacgtaaggtataccccgttcttcaaaataagaacctattctaccgatcatcgttgttttaccggaaccctctcccccttccagcgtaatgaatttacctctgccctgcatatgcttccctgctttctatgtcgataattgcatctattgctgctgtaattgaatatgcttagaccctcttgctacaagatatgatatcccccgcccagaggtgtatagctacagctatatcggtacgtattaataacaccaagatcatacaagcttgtttctttctatcatactataggtcagcagttactccaacatgaacaacaaagtaaagcgttcaaccgtagataatccatacccataatggaagcataattgatccggcaatagcactgacaatcatggaaactgaactgagggctaccgcattctctccatattcaaaagaccttgccatgccgagggcatgagatgctgaacccagtccaattccataggcatgtttactgcggaccttggcccatttcaagagcatcggccccaataatatccctgagaatcctgcaatcatcacaaacagcgatgtgaatgaggcattccccccaacctgattagcgagttgaatagccacaggagttgtcactgattttggcaataaagcgatgaccatctcttgaggatagccaagcagaatggcgatcaacgcccccgtggagacacctgtaatactgcctccgattgttccacccacaattggaatgatattttgcttcagcacatgcagatgtctggacaagggaaaagcgagcgatacaactgctggacccaagagctcctgtatccatttgccacccagcatgtacgtatccagctttataccggagattaccaagatcaggatcagtatggcagtcgttgtgagtacaggcataaggatcggccatttcagccttttatatagacgagtagctggaatatatacagcgatggttagcgcgatcattccaattccgaggatgaatgctgacaagtaatcgcctcctttttgcctgaatgagacgatctccatgtcatgagccactcacttaatttggcagatatcagacatgtgattaatgtgctaacgatcaaaccaagtaccaataacaatgtgttggctctaaaaaaatcaaaatgattaataatgcccacagttggcgggatgaacaacaattgcagatgagattgaagccacgtcgacccttcttctccccagctcattttgatccatcccagttgaatggtgacaaacaataccagcatgcccacaatactgcctgttaacggcagatgtaatagagcttgaatcaagttgccaatccaataaaaaccgtacatcaacaaaacttgcaggactattcctgtatatttttttagcggaatacccaaagtgttcccttctttcttatgtctatctctataagttgaactaaagcgtgtcttcaaactgaatgtgtctggagcagggcacggagcgggagcgctaacgaccctgtgacgtcttattcagcgatttgaagcgcccgcagcaatctaaggaatctgaaacacgttatattggaataactagccgtttacagcgtgtttgttaggtcaatttggttaataacgtgtctcaggttccttacaaaataaaaggagtactcgaaggctaaataagacgtcctcgcttccttagaaaatcgtctggacaattcgccaggatcagcattccttgacttcaagctgttggaccctgacatccttcaacgtattgcatgcctgagtttgaagaacaccctagcaactagattaatgaccaagagaccctcacatgtgtagggtccgataccgctatccgtattggtcatattgcctacctattggtgaatgcaattcagatcttcatgtgttcccttcattccttcataaccttcaatacctgtagagatgcatcggataccccatgaaactttgtaccctcatcccgcagcagttgtatacgtgccaccatcgttggactaatacgttcacccggatatacaagcggaatccctggagggtatggaataaccatctcagctgatcgacaacccgcgcttttttctatcaggacattgatcgtatccgtctccacaatcggttgcagtgtaaaggagatcggttccgagtagcgagttttttcttgtaaattgttccacgtggaaatataatgtgccgaacctttcgcaatctgttgcgatggctctgcattagattgtacctgctcatgcccgttggcagagctgatatggtgtaaagcctgcaacaggtgctgagcatcttgcaccgttgagcccaggctgaagagcaagacgacgtaccgttcgtcgctcatctcgggcacacagccgcatgcttccagctgctgttgtagcccataaccgctcagcacccctgtgccgtcatagatgacggccttgaatgggtcctgagcggtataccccgcggcagatggcatcgccgccgcggtcaagccctcccgtgtctgctgcgcagcggatacggacatgccagccggcttcgcagttccggctggcggttctggctgcagttgctgcgcaggctgcagcaactgaaagcgcgtcagctccgcgaggccgcgcttaaaggctttcacggcggcaagccccgccgtgaatgtgttcgcgccctgcacatgcagcagccggcgcgcaagatcaagcgaagccatcaccgggtatgatgggcttgagctttgcaccatggccaggcgctgccttaacagggaccggtttaaccgtggtccctgaatgtgcagcatggcacccatggtgaaggccgtcagcatcttatgtgtcgactgcacgacaccgtctgctccgcatgacagtgcagagacaggcagctccggatgctgcccataatgcgcgccatgcgcttcatccacgagcaatggcatgccagcggcgtggcatacctcggctatgggcgtcagatctgcgcccataccgtaataattgggcaaagtgaccaatacgccctttgcctcaggataggactggacagcagcctgaaccgtctctaccgacggcatgaccgcaagtccactcgcaggatcaacccacggctccagaaatacagctcttgcgcccgccagcattaacccgtgaataacggatttgtgtatattccgttgcaccaggacaatactgtttggctcgtcacacacggtgagcaatagggacagattacctgctgtactgcctcccacaaggaagaaactctcctcagcgccaaaacaatctgccgcaagctcctgcgcttcctggattacaccttccggatggtgcaaatcatcggtgcccgtgatctccgtaacatccatctccatcatctccagaaatgaacgcactggtgtcagttctaattccgagtgagccccttcaacgctgagtcgttccacactctgcagatcagccccatgttcatccaccgaactgaaacgctctaccttctggttaacattctttcctccatcattctgaatctcaccgttgtgctggtgttcctcattgacgatatccttagctggagattgccctgcttctgcttgttccagtaaatgtcggtaagcttgtccattcttatgcccaggcacatgaaaagaacgctgcttagaatcacgatacgcaagcaacgcttcatataaaggggcactacttaatttatttttatgttccatgaaataaccatcctgtacatatataatgtgcaccctatgcgcttcaaaatgcttcctaatccaaggaacgcacttcttccccatctccacacgctctactgcaaatgatctatacccattatatcagcataccccttcccaagatggcaaacaagacaatctctcctcttaaaaacagaaaaaggcccaatgggcctctatacacatcagcatcgttacaatgtgatgtttcgcttctacttctattagcaacattcattatgcgtttttttgaacccaaatttgcttcatttgatgaataaaataattgtacttggcatcctgcgcgtcggtatgaaccatttctgcttcacaagtgtcacatatgaattcagatacaataaaaatgccttctctttttctttgctcgcagataatacatgtgtgttcggcatgttcttccatgaaccatcccaccttgttttacgtttactatcagtattgcacagtttctattattttaaacattttcatagtgctttctttctataaaatatatatattcgcccaccccctcttgggtgtctgtaccgaaaaatacattcattctccctacaagaacattcacctgcttatgtatatacagtactcctacattccatcgcatttacctctacatcacgtatcccttggcctgactcaaacttatattcaatttccttaaaaaaacttggaatcccagccgatatataatacatgataacgatatcaaagcctgacagtccgtttattcgggagtatactgagataagctccgtcgaatctcaatatcttgtacaatcgtcatggcgtgagatacaaggttcatatatacatacatgtatgattcattcccttttactcgtgtaagaaaaaacgaatacctaccccacacaaacgtgaatccgaaggaggatatataatcgtatgatcgccgaaccggagaataaagcaacattttatcaataccggcttctgaaaaaaaaggctatcgcccgcagtgtcatttacagctatctgtgtctgccggtcatcatgctcttattcaatctactcgccttctcctggactggcctcttcttttttgtactggcaggtccaatcaccatctggattcattatgtcatcgccagaacgatattacttctggtccgtacctcttacgctaaacgctggcgctggaatatgcgtatgccctggctaggttatatccctgatcagcattttagcttccgtatgtttgtccgggtacaccttaacatgagctggattggattatgtatcattacagtatgtttgatatggtcgccattgtccttcaccctctcgctgatcttctggcatttgtggttgctgggtcctcgcttgtatgttgtaatggtactctcccgtgagcgcaaagatggactcatcaaattgaatgaacaagatgtctcatattatctgcaataacactccctcatttatgcaatactcaatgtaccttacttacttgtaatacataaccgctgagcccttcgaataatctgatgcaaaaacatgatcgttgtatcgttctgttgactcagcctcacatgctcaaataaaggttatccactgtggataacctttatttattgttcccttctcatccattatccacagcatgggtatagttaaatgagttatccccacgctaggctccattcttcacctcttttcctgccgctgctccatatccttatatccccagatatctcgtagatcttacacctttgagcgatcttttgccttagtctcagctctatctgccttctagctgcttcccatcagccattcattacctcaatacctttatacaacttatctctctccccctatgcttcaagcacacataccaccctatacgtgtaccaaagaaactgctcattccttctaaacctgtatgacctctgatccaccatacgtgatagcttctcccatcattactaaaacctacttccctaaataacaaaaagcccccgatcagatacatgggagctttactatattataaggaacatcacaacgttaattgatcataccgaaccatacctgaactagctcaatcatcttcagccaatgatttaactgtcgtttgagtagcatcatttctaggaaccattagtgtaaaggaaccatcatgtactgctaaatgtacagtatgtccttcctttgcaaatacacgcaaggtactggattcattggatgtacccttggcttgcctctctgtccaaccccagcttttaatctcgtctagatatacctcaggcaagctagtactctcactaataccagacagcgtatatcgaacataatccatatccgaattattttcagactggtcagatttattcgctactttcggcaccggaaaactcttctcgttcaccgcaccttcatatgaagtccatacagatcctgaagcttcaccgcatcctgccagaacaacggtcaaacaaagcaacagaaatgattgtagtccaagtctccgccaacttaacacacacaccctccttttcacagctgcacattccagctctgtggtcaggtacttttagcatatttaacatagtcctattatactggttttgccgctgttatccgtaacaaaaatgttaccttccagtatcgatcatgtcagagcttccacttatcatatttaattcttataaacaaataaaaaccaccaccgaataac

SEQ ID NO: 18 - DNA, 63278 bp, Paenibacillus xylanexedens
  source 1..63278: mol_type = genomic DNA
attcaatttagtgctgtttttcatgttgtcgtcgtttcagcggcgacttttataatatatcatgttgaagttctctttgcaagcattattttttcgattattttcaatcgctttattttcatgcttgtttccgtgaaccgatcctaaaaaaggaacgaaaattaatttaccatatgaaattagaaaggtcaaccttttttcgacaaaaagtatgaaacccttaacaatttcacattctcatagttcagaggtacagcacccgctatgaagagccgcacctcacttccactactgtaaatcgaatatatgaccagcttcagcattatggcttcgactttttcagcttcccacctctggcatacttggacaactcttttggcggggcaaagcgtgcatacatgcggaacacagtcttatatcggctcgcgatagcatatttgatctcttggtcaagacgattatcacttagatcgaaaagcatctcatctaattctttacgcagcacatagtctagttccttgcattccttctcgttaaacaacatacccagcattagagttctcctttttgtgcatagcctctttatcacacttacacaagtttcatgcaacaccccgtgcattctcgctttttgtgggtgctgctgaaacccgttttattgttatggtcaactttctgaaaatttatgaatgccaaccatcacaaaattttatcctctcaccagagtatacgtaagtgtgctttcgatgattgctgcaacaagaagcaagatgacaacccaaaaggatgccgttaacgtcctattcatgaatgctctccaccgggtacccatcgtatttcgcttgtcacttccaagttgtgcaaggcttttgataaccagaccaccaaacttcagtccgaaggcgcaagcaatgataatgaccggaatctcaataatgccatgcggaagtaaacctttaaccacaatgtcatagaagcttgctccataattcatcgtggtgtgcaccacaaatccaaggaccatcccattgatcagcaggaagatgacaggcagaattccgaagaatataccggcatagatgacaagtacacttttgatggcattattgaaaaagataaacagaaagaagttccattgcacattgcccccctgctccaagcgttcactgatttcacgtaatcctccgatttggttcaacaacagttcttccagtggccctgtactcacccatcctgcccctataccaacagcaaataaaactacggaccagattaatgcactgcggatggaaccaagatctctaagaaatgtactgaattttaacataataacctcctgtagaatctaaaatgatggacaaacaaggagcagtgacgaataactgggcagtacgagcatacattggagagtaaacaagcatttcttatgggagaggggcgcttattgaaatgaactcgttctatgtatttagcggcaaaaagattaaacggtacctgattgtcctcgttgctgccatctttgcgatcggtattatctatctggagagaggcaatgtctccgtattctcggaggaagcaccatcagccgtctacagcgttccaaccgagaagaaggtaatcgcacttacctttgacattagctggggggataaacggacggagccaattctgaaagttcttcaggagaataaagtgcagaaggcaacctttttcctttcctccccctggagcaagacacaccccgaaattgttactgccatcaaagaggcaggatatgaaattggcagccatggtcacagacatgagaactacagcagcctgactgaagaagaaattcgcaaagaaatttcgacagctcatagcattttaaccgatttaacgggaaaagaaccgaaattactacgtctgcccaacggggactttgacaagcgagtgcttcaggtagccaatagtctgaattatcaggttgtgcagtgggatacagactccttggattggaaaaaccctggtgtacagaccattgttgatcgcgtggttagtaaagcacatccgggtgacatcgtactgctgcatgcaagcgattcctccaaacagacgcatgaagcactccctgtcattatcgacaaattaaaaaaccagggctatgaattcgttaccgtctcggaactgctgaaccattctagtgtcgagggcaaagaagttcgtgaccaagccagcggtcaatgattactcaattatgagctatagctcaaataggtgcgtaaaagttgaaaagagctaaccaggttagctctttttggtatgttttttgtgcaaaatgaattctatgctcggctttctttcaactgttctgcctttccacttacactccggttcgtcgatacatccaccagcctgtgcaatatcagcatttggtatgcattacataggagcaagggaaccacaataaatatggttgcagcattcacatcaatacgtaatacgccgatcgtctccactatggtgacggcaatcatgaaaaagagtgtaggtacaagcgcggagatatgagtcagctttactttaacgtaagcggtaacaattgcagctgccaaaataatgatacctaacacaatatccgatatgcgttcccggtctcccccaacaaacaggcgtaaaaacatcacgtcaagcagggctaacaccgttagtacaatctgcacgatctgccaaccgcgctttggaaatacacctttacccatataattcaatatcagatatgcaaagaaacccatttgtgaatacacgctgatcataacccctgatccaaataagatcaaaagatacagaagaaaatcattcaatccatttgttttctccccgttcaccagcatcataatcaatcctgtacccaatgctcccgctgccccaataagcaaggctgtccaaaacaggaaaaaccatctacgtaaattcaaaagttttccacccccgagtgtttattttaccaaccttctcagcaaaaaaccatcattgctcaacatatttccccctttcccatcacatactacatccagtatctaatcaaggagggattgtacacatgaaacggcctttgtggcagctatgctgtgtcgtactggggctatccgtcatgcttgccggctgcggttcagatcagagttcttcgcctcctcagggcagttataaagagatgaaaacaatggttgtagatattttgaaaagtgatgaaggcaagaaagcggtggaagaagctcttacaggtcaaagctcatccagcggaagcagcggttctgaagaaggtggcggttcgggtggtgcttcaggatccattggtatgaaaatgttaatgcctgtgcaatcttcggaacaaatacgtattgcagtaaaagataccatcacagctcccgaatataagaaggaattcgaaaagatcatgaccgatccgcagtttgcgggtgaatttgccaaagtgatcaacgcacaaagtaaacaacttcatatgcaattgattaaagatcccacatatcaaaagtctgttgaagacatcatgaagtcacctgaggtatccaagatgttcatggatatgacgaagactcccgattatcgtaaacagacgatgactgtcatgcaggaagtgatgcaaaacccgttgttccgtatggaagtactcactttgcttaaaaaggttgtgcaggaggaattacaacccaaagtagaaagtggcggacaacaggggcaagagcaaggcggacagcaagagggtcagggcgaaggtggtggtgatggcggagatggtggaagcagtggagattcgggcggcggatcataaacagtaggtgttactacgcaccacagatactgaaaagcctgcatccaaatggacgcaggctttatttgtatttataacactcataccattagaatttggagtcaatggaccgggcaacttcatcgtagatagcccctatacgggaatctgctttgtaaaccgaaggtgagaaatcaggctcggaaggatgattatccggcgtgcctaatggaatctgggcaagcaggcttgtatgcagactttccgcaagtcttcccccgcctccacgaccaaagacataatccttctctccgcaactgccacactcatagtacgccatattctcaaccaccccaagcaactcatgatcggtctgaatggccatcgcacccgcacgtgctgcgacaaaagctgccgttgcatgcggcgtggtaacgatgatttccttactctgtggcaacatctgatgcacatccaaagcaacatctcccgtacctggtggcaaatccagtaatacataatccaattcgccccactggacatccgtaaagaattgacgaagcatccgacctagcatgggtccacgccagattaccgggttgttttcccgaataaagaagcccatcgacatgactttgacgccaaaacgttcaatcggttgaataacgccatcttcaacgaccggatattcttcaatccccatcatgtcgggtacactgaagccatagatatccgcatcaattaagcccactttcttgccttgacgtgccaaggctgcagccagattaacggttaccgttgatttaccaacgccacctttaccactggccacagcaataaaacgaacacctgattcaggacttaacagctcatgtccatccagacccgctgcgtgaccttttacgagcacttcgtcccgatctggctcattatcgggttgtcccatattcaggctctcacgatcatgctcagaagctgcacgcacacgaatatgtacatccttcagtccgtgctgggacaacagattacgcgctgcatcactcaaagctgttgtatcctcaggtcgattttccagtgtcactatggtcagagccacatgattttctttcaccataatatctcgaaaccattccagttcggtcagacttactcccaattgtggttcttgtaatggctgtaatagttcaagtatctgttcttttgataacatcagacagcacctcagctttatctattggcatgtaattaggtatgctgatccaattatatcattacctttcttgttctgactaacttttaggccgttctcctgaggaatatctgagaattccattatagatcgatgcagctaccttgcgttgataagcttcgtcagcaagcatacgtgcctcttccggatgagaaaggaaacccacttctaccagcgctgaagggatcttcagagcctgtaacagataaaccgtattcaccgttttggcgattcgatctgtattctccagattacgaaccatctcttgttgaagaagattagccaaaccttcgttatccggatggttagttgtatagaaaacctgcgctccactccatcggttggatgggacactgttcatgtgaatgctgataaagagatctgcttgcttatcctctatccgtcgtactctttgtttcagatcttccgtcttgcgtttggagtaccccttggtgtccgattccgccaaatcagtgtctatttctcgtgtcataaccactaaggcccctgcctgttgcaaataatctctcacatacagggcgatagacaggttgatatctttttcaataaccccctgtttacttaccgctcctccatctggacctccgtgtcctgcatcaatggcaatgactttacccgccatcggcaaactccaataacctgacgtcttagcggaaggcagttcataggacattaccgccactaacatggccagtagacagagactcagcatgacccttttgattgtttttagcctaatccagactacaaagtgtttccccatatttttacgcataaaaaaaccacctcgtccctataaatgactctaatcatctatatgggacaagatggacaaatataccgctaggaccggacttgctccgccattccttcaatcagcacctcagctacctcaggacgtgtaaattcaggtggagggcactggccgtcacggagcaacccgcgtactttggtgccggaaagcgccatatgatgttctttatcatgtgggcaagttttgctggatgccatgtttccacatttggtacagaagaaactatgttcgaagaacaacggagtaatccccagttcctctgctgtaaagttagtaaagatctcctgtgcttcatatgttccataataatcaccaacacccgcatggtcacgaccaacaataaagtgggtacacccgtaatttttgcgaaccatcgcatggaaaatagcttcacgtggaccggcataccgcatggctgcggggaacacaccaagaaacgcacgatcagccgggtaatagttctccagtaataccagataactcttcatccgaacatctgcaggtacatcgtccgacttcgtctctccaacaagcggattcaggaagagtgcatctacaatctccatagcgctcttctgaatgtattcatgagcccgatggaccggattacgtgtctgaaaaccaactacggtcttccaacccttctcctgaaaaatcttccgggtatctgcaggatcataatagaattcctcaaatttcgaaggttttggacggttcaacacttggattggacctcctacgtatgttgcaggacgctccaacagttttttaacgcccgggtgctcgggatcatctgttttgaatacacgccgggcttcttcaccctgatccacctggtatatactttggacttcgagcaatccataagtgactccatcttggtcaccaacaagtttcacacgttcaccaatctggagggatgcggcttgtttatcgtcaacagcaagtgtaatcggtatactccagactgttccatcggcgagacgcatgcgagacaccaccgaaaggtaatcttcctcattcaagaaaccttgaagtggtgagaacgcacctacaccaattagatccaaatctgatatcgtccaagtattaatacgcaaagaagataagtttttactgtcttgtaacaattgctcccgttcttctccttgtacgatacgttcaaccaacgtacctccatgaggcagaatcgatgtcatcttgtcagctccttgtatatctattatttatgaaggccacattccgttttatcattaccagaccagcgtccggcacgtgggtcctctccaggcataacttgacgtgtgcaatgctcacaaccaatacttgggtagttctgatcatgaagagggttatatacaacgttattgtcacgaatatattgccatacatcctcagtcgtccagtgagcaatcggattaaacttcatcaggccaaatttggaatcatattcaaccttctttgagtttgcacgagttggtgcttgatctctgcggatacctgtaatccatgcatcatactgagaaagaatacgtgttaacggttcgactttgcgaatgttacagcacccattgggatcagacttccacaactcttcaccgtgctcagctgcctgctcttctggagtaatcttaggtgacacacgtacaaattcaaggttgtagttctcctgcatcttatcacgtgtttcgtatgtttctttaaagtgaaaatctgtatccagataaaaaatatctgtggatgggctgattttctgcaccatatctacaagtacaacatcttctgcaccaaaactacatgcaaaagtgatatttgggaatgtttcaatagcataccgaataatatcctctggactggcatgttccagttcctctgccttcgtccgtgccaaatcttctttctccaacaagttcatctgtgaatttcccccattctgcatttcaatacacctaaagccgactaatctaatatgaattatgtttagtataaatctttcattggggatgtcaatgcctgccatatggtaaaataaatcagtttttgaccctttttgattgccgctatcacacaatattttggttcaatttatccatttctctgttaatgagataaaaacaatgatattggcccaggtcattagacaggtaaaaatacatcgcttagcctgggaaacctttgctgttactgggtttggacagttcttgtcgtcaagaacaacatcaaaaaatcactgggcgattgaagttgaaggaagaaaagctaaagttttaaggggagcagctttgcggattttagctgttgatatgtaagggacttttatcgtttccataagaaatactgataaggtttgcaataaagaattaagtgcaaaacattaagctgagcgcatccaagaaatctggcgtgagttctaaacgatgattttataggagctgttatagaatgtgtggtgagcgatgggtgagagcgtaagagcaaattcaatgatataaacgatcagagaggttcagtaagatgtagatgtatcaacgtacatattataggactgtattgagggacattatgagcacattgaaaaggtaatgaaggaaaaatgcacaagcatggggagagacatcagagataagagagctatcgcataaactaatataatatatggcgtaatagtcatgaatatataaaaaagcctttgaccgaggccaaaggcttttaatattaacgtttggagaactgaggtgcgcgacgagccgctttaagaccgtattttttacgctctttcatacgtgggtcacgagtcaggaatcctgcttttttcagggatgcacggtattccggatctgctttgagcagagcgcgggagataccatgacggattgcgccggcttgaccggagattccgccaccatgagcaataacaagaacgtcatagttgttgagcgtttctgtcaagttcagtggttgttttacgatcagtttgagtgtttccaaaccgaagtattcattaatatcacgtttattgatgacaatgcgtccttcacccggtacaaggcgaacacgtgctaccgaatgtttacgacgacctgtcccatagtattgtacttgtgccatgaaactgtcctccttttaattaaccgcgaagttcgtaaacttctggtttttgtgctgcatgtggatgctcagtgcctctgtacgctttaagtctcaacttcattttctcgcccatgcgagttttaggaagcataccgcgaacagccaattccaacatacgctcaggtttgtttttaaccatctcttcagctgtagttactttcaaaccacctgggtgcattgagtgacggtagtattttttaccttgcattttcttaccagtcaatacgattttctcagcattgatgataacaacgaaatcgccagtgtccacatgtggagtgaattgtggcttgtgtttgccgcgaatcaaagctgctgcttcgctcgccaaacgtccgagggttttgccttcagcatcaatgatgtgccattggcgctcaacttcgttaggcttcgccatgtacgtagtacgcatgaaaagttcctccttaaaatgttcaaaatcatcattttcatttatcttcgttcgttaagttataactttaggtgttgatggattgtaaatttgatgtgaacctcttaattggggctgtgggaaagccattaagaaaacacaacttttatattacatgataggcgattaaatcgcaagtgttaattaagcttttcactcaccaaatttaatcttttttgtattcaagatcccagagcattaaaccgcagctaactgcagtaggtcctgcagcagatcgattacatgcagcaatcatatttggtacatcagaggctttccgtttgccctctccgatctccagcagtgtccctacaatgatacgaaccatatgctgcaaaaagccgttaccactcacataaatgtgaatgacaccctgatcgcgcggatggtctctgcacattgatcggtccacttccatccatgcttcgtacaccgaacggacatgattctctttctgagacttgcgtgaagcaaaagaggtaaaatcatacgtccctatgaaatgtcgtaagccctcctgcattgccataatatcaagcttcgcatgatgatgatattgcagtcttctgttaaatacatccggaaattgattcgcattgactgtataacgatacgttttctttttcgctgcatagcgagaatgaaaatcagccgaaacttcaatcgcatcaataacgacaatgtcggagggtaatctggagttgagtgcaatacaccaacgttcaatcgggatctgggactccgtaggaaaattgaagatttgtctgcgggcgtgaacacctgcatctgttcggcctgaacctgtaattttaaccttctcaccggttaaagcacgaatcgcatcttcaagatgatcctgaatggtattcccacccggctgtacttggaaaccgaaataggcagtgccatcataagttaacgtcatacataagttccgcattattaccacacctttgttccatactatacatatccctatcccgaacagcaaaagaagccccttacggagcttctattacagcacgaattccgaaatgaagagaaaaaaagggttaatccagaatcgttgattctgtcccctttcctcatctcatctgttttacgcgcggtctaccagttccaagtaaaccattggcgctgcgtcaccacgacgaggtcccagtttcaagatacgagtgtatccacctggacgctcagcgtaacgaccggacaattcgctaaacagtttttggattgcatcttgctcaccatcgatagtttcgcggcgaacataagctgccacttggcgacgggcatgaagatctccctttttcgctttagtgatcagtttttcagcaatagagcgaacctcttttgctttcgcttcagttgtctgaatgcgttcgtataagaacaggtcggttaccaggtcacggaacaaagctttacgtgcgctggaattacggcccaacttttggtatgccattgttttccctccttcacttcaagcactcggctgtctattcttctgtacggagtcccaaaccaagttcctcaagcttctcttgaacttcttccaaagacttgcgtccgaggttacggactttcatcatgtcttcttccgttttcgtagtcagctcttgcacggtattaataccggcacgtttgaggcagttgtaggaacgaacagagagatccagctcttcgatcgtcatttcgagtactttttcttttttgtcttcttctttttcgaccatgatttctgcatctttcgcttcgtctgtaagacccacgaagagcatcaaatgctcagtcaaaattttagcgccgaggcttacagcctcttcaggacgaatacttccatcagtccaaacttccaacgtgagcttgtcatagttggtcacttgaccgacacgcgtattttccacagcgtagttaacgcgactgatcggggtgaagatggaatcgactgggatgacgccgatcggctggtcatcgcgtttattccgatctgcctggacgtagccgcgaccgcgattggcaaaaatacgcatgtgaagtctcgaacctggtccgagcgtagcaatgtgcaaatccggattaaggatttccacatcggagtcagcacggatatctccagccgtaattgctccttcgccttcagcatcaatctcgagcactttctcctcgtctgaatgaatcttaagcgacaaagctttcaggttaagaataacctccgttacatcttccattacgccaggaactgtagcaaattcatgcagaacgccatcgatttgaaccgaagacactgccgcacccggcagtgacgagagcaagattcggcgaagcgagtttccaagcgtcgtaccgtatccgcgctcaagcggttctactacgaatttcccataggtgccatcatcgttgacgtctaccgtctcaattttcggcttttcgatttcaatcactgcaatacccctccttcaaaacgtcggtcctctatgaaacatttaccttctcttgcgaaaacatgtagtagtatgcctaaacaaccattattagcagattgtgccggaaatataccacacgcaggggcaaatctcattagacacgacgacgttttggaggacggcatccgttatgcgggactggagttacgtctttgatcaggttaacttcaagaccagcagcttgcaaagagcgaatcgctgcttcacggcctgcgcctggtcctttaaccataacctcaacggctttcatcccatgttccattgcagctttggcagcagtctcagcagccatttgtgcagcaaacggagtcgatttacgggaacctctgaatccgaggccgccggagcttgcccacgaaattgcgtttccgtgaggatccgtaatagtaacgatagtgttattgaaagtggaacggatatgcgccacgccagattcaatattcttacggtcacgacgtttagtacgtacgacttttttcggtttagccattttctcttatccccccttattatttcttcttgttcgctactgtacgacgaggacctttacgagtacgagcattcgttttcgtacgttgtccacgaacaggcagaccacgacgatgacgaactccacggtaacaaccgatctccgtcaaacgtttaatattcaaagagatttctcgacgcaggtcaccttctactttgacctctttatcgatactttcacgcaatttgctgacttcatcttccgtcaaatcacgaacacgagtgtccggattgatgcctgttgtgctcagaattttctgggaagtcgttttaccgattccgaaaatataagtcaaggcgatctcaacgcgcttatcacgtggcaaatccacaccagatatacgtgccattttacgctacacccccttctttaaccttgtttttgtttgtgtttcggattttcacagataaccataacattccctttgcggcgaatgactttgcacttttcgcaaatcggcttgaccgaaggtcttaccttcatgtgaattacctcctcaaagttttgctaagcaaaaccctcttcgtaagcattgaccttgttctactattgtaaaaccggcttcgaagctttcgcaagttttgccgggcaaaacccgctacataagcttcacagttcattgcaactgtctactactatttacggtaagttatgcgaccttttgttaaatcataaggcgacaactgaacaactactttgtctccagtcaggatacggataaagtgcatccgcagttttccggaaacgtgagcgagaatttgatgaccgttctcaagctcaaccttgaatgttgcattcggtagcggttcgagaaccgtaccttccacttcaatgacatcttccttagccattagtcagtctcctttctcttcagattgaatgttggtggattccagaaatgaatgaaccgcgtaacggagctttccatttgtcacccgaccactctcgtttaaactgttcacaacctcgctgctaatcatgggctggagctcaagatgaagaagattcttcttctttggttgatcaaacttacgtttgtctccatccgcaatatatacgaacttaccgtccgctatagcaacaattactgcggcttggtccgcattgcggcctttacggatcttcacaagttgaccgagctgcggattagactgactgttcatgcctcatcacctacgcattcagtttcgtgaaaatttccataccatctggtgtaactgctacggtgtgttcaaagtgtgcacataacttaccatcaaccgtgacgacagtccagttatcttccaacgttttcacataccgtctacctacgttaaccatcggctctatggccagcaccatgcccgctttaagccgtggtccccgatcgggaagaccatagttcggaatctgtggttcttcgtgcagatctgcgcctatgccgtgaccgacatattcacgaactacggagaacccttcatcttcaatatatttctgaatcgcatgagatattgtaaacaagcgaacgtccggttttaccagcgccagacctgcgtataacgaagcctcggtaacgtccagaagacgacgggcttcttcggaaatacggccgaccggataagtccaggcggaatctccatgatacccctggtactgcgcgccaatgtcaaacgtaacgatatcgccctcgttcaacttgcgtttgccgggaaatccatgtaccaactcttcattgactgaagcgcacacactggcagggaaaccgttataacctttgaaagacggcacagctccttgactgcggatatattgatcagccatatggtcaagttctccagtcgtaataccgggagcgatatgctctgccaagagacgatgcgtttccgcaacaattctccctgcttccctcatcaagcccagttccgtttcggacttaccaatgatcatcaattaacctctcagtaaggacacgatttcttgagaaacttgatcgatatcctgttctccgttcatttgacgaagaagacctttagtctcatagaacgtgaggagtggtgctgttttgttgatatactcgtccagtcgtgtacctacactctcttcattatcatcagagcgttgatacaactcaccagcgcatttatcacaaataccttcctgcttaggcggattgaataccacatgataagtggaaccacagtttttacaaattcgacgacccgtcaaacgagcgagcaatttgttgcgatccactttcaggttgattacatgatcgagacctgagttcaatcgatccagaatgccatcgagcgcttctgcttgcgaaagggttcttggaaatccgtccaagaggaaaccttctctgcagtcaggctgctgcaaacgttcttcaacgatgccaatggttacatcatctggtacaagcaatccttgatccatatattccttggctttcatgccaatgggagttccctgtttgatcgcgagacgaaatgcatcgcctgttgaaatatggggaataccgaactctttcacgatgacgtctgcttgcgttccttttcctgcccccggagggcccatgaataggatgttcacgttatgtcactccctccaagactaccctacatcaacaaacagcacaataggtgccggcaagtaaatcttcactcgaccggtacctattgcctatttattgataaaacctttgtagtggcgtttgatcaattggctttcgatttgcttcatcgtatccagcgcaacaccgataacgatcaggagggatgttcctccaatttgcgcagattgaggcaaaccagacagtgcccccaagattacaggcagaacggaaatgactgccaagaacatggcaccggccattgtcaaacgagtcatgacacgggtcagatatttctcggttgctttacccgggcgaatgcctgggatgtaaccgccgttctttttcatattatcagccatctgctgtggattcatctgtacgaaagtatagaagaatgtgaaaccgaagatcatcacgacatacaacaacatacccagaggtttgtgtgtagtcaggttctgtccgatccactgtgcccaaaggcgatctgcccagaagttggcgatgatcgtcgggaacatcaacaacgatgatgcgaagatgacagggataacacctgctgcattaattttcagcgggatatgtgtattctgtccaccgtacattttgttacctacgacacgtttagcgtactgtaccggaattttccgaatcgcctgctgaatgtaaatgacccctatgatgatcaacacaataacaattgcgatgataacacctttaagaatattcataaacagttggtcaggttgaatgaagtcggattcgatcgtttgtttgataatgttaggcaccgtagataggatacccgcaaagatcaagatcgaaatcccgtttcctatgcccttctcggtgatctgctcaccaagccacatcaggaatgaagtaccggccgtaagtacaatcgcgatcaagatataatctgcaaatgtagcgttaggaatcatgtctgtattgtacaagcggttgaatccgatcgacgtaccaaacgcttgaatcaatgccaggccaatcgttaaataacgggtcaattgtgcagatttcttcttaccttgttcaccttgctttgcccactccgctaatttaggaataacgtccatggaaagcaactgtactatgatagacgcagtgatgtaaggcacgatcccgagcgcaaatatcgagaactggaagagcgctccacccgagaacgtattgagaagtccaaaaacttctttacccgcagaatttgtcgcttcgaacacgtctttgttaactcccggtacgggaacaaaggagccgatgcggtaaatgatcagtacaaaaagggtaaataatacccttttgcgcagatcttcaacccgccagatattctttagggtcttgaacattaaatcacctcggttgtaccgccggcagcttcaattttctcaatagcagattgagaaaacttgttagctttaacagtcagcttcacagtgacatcaccgttacccaggattttgattccggatttagcgtttttaactacgccgttcgtcatcaagaattctggagttacttcagtacccgcagcaaaactgttcaggtcttcagtattcacaactgcatattctttgcgagttgggtttacaaaaccacgttttggcaagcgacgatacaatggattttgtccaccttcgaagcctggacgtactccaccgccagaacgagaattttgtcctttgtgaccgcgacctgatgttttacctgtaccactacttggaccgcgaccaagacgtttacgttctttgcgggatccaggagatggtgaaagctcatgtaacttcatcgttcgttgcacctccttaaagatttgtgggattaacccgatattaagcttctacttctttaacagcaaccaagtggcttactttgttaatcataccacggatggcaggattatcgttttgtaccactttgctattgattttgcgcaaacccaatgttttcacagttgttctttgcgtctccggacgtccgatcaagctgcggacgagggtaatttctaatttagccatgagaattccctccttaacccagaagctcttcgacggattttccgcgcagtttagccacgtcttcagcacgcttcaaacgggacaaaccttccaaagtcgcattgaccatgttcatggaattcgaagaacccagagattttgtcaaaatgtcacctacaccagcaagttcgagaaccgcacgtacaggaccaccagcgataacaccagtaccttcagatgctggtttcaacagcacgcgtcctgcgccgaacttacctgttaccaagtgaggaatcgatgttcctacgagtggaacgtgtacaaggtttttcttagcgtcttcaatacctttgcgaattgcatcaggtacttcgcccgctttaccgataccagctccaacccagccgttgccgtcgccgactacaaccagtgcgctaaagctgaaacggcgtccgccttttactactttagctacgcgattaatatttacaactctttcagtcagttccaaagtattcggatctacacgcaagtcgttaacctccttttgaaaaatatcttaaaactcaagtcctgcttcacgagccgcttcagccaatgctgcgatacgaccatggtacagataaccgctacggtcaaatacgatgttggaaacacctttgtctttcgcacgtttagcaacgagttcgccaactttacgagctgattcaacagatgcaccatttttgatgtcagtgctcaattctttgtctacggtagacgcggaagcgattgttacaccagcaacatcatcgatgatttgagcatacatatgtttaccagaacggaatacgttcaaacgaggacgtgctgccgttccttggattttcttacgaacacgaaggtgtcttttcagacgagccttatttttatctggtttcgtaatcatctcaaagattcactcctttcaggttacctcgctggcttcaaagcagaagccacggggtatattagaaacacacgaagcaagcaagccgaaagccgcgcaaaggcggtaagagaaatcttatttcttcttaccggctttaccttccttacggatgatacgctcgccttcatatttaatacctttacctttgtacggctcaggttcacgtacggaacggattttagcagcgtaagcacctacacgctctttgtcaattccgcgaacgatgatttttgtattcgaaggtacttcgaattcgattcccgcttccggtgtaatttcaaccgggtgagagtaaccaacgttcagaacgattttatctccggatttgcttgcacgatatccgaccccaaccaattccagagatttagcgaatccttcagtaacgccgctcaccatattgtttacaacgctacgcgttgtgccgtgcaaagaacggtgagttttgttatcggaaggacgcacaactgtgatttcgttattttcaactgtaaccttcatgtctttatgaagctcacgagtcaaagttcctttaggtccttttaccgtaataacggtgttgtccagggtgatgtctacaccacttggtactgtgattggtttgcgaccaatacgagacatatgttgcacctcctatcttgtgacgttatattaccaaacgtagcaaacgacttctccgccggatttcgattgacgagcttctttgtccgtcatgatacctttagatgtcgagatgatcgcgattcccaggccaccaagtacacgaggtacttcgttgcttttcgtgtaaacacgaagaccaggtttactgattcttttcagaccagtgataacgcgctcgttattttgaccgtatttcaggaaaacacggataatcccttgtttgttatcatcgataacttcagcgtcacggatgaaaccttcacgcttcaaaatatcggcgatttgttttttcattgttgaagcaggcatttctaccgtttcgtgacgaacagtgttcgcgttacgaatacgagtaagcatatctgcaattggatcagacatagtcattgtgagttaacctccttcccgttcaggactttttaccagcttgcttttttcacgccagggatctggcctttataagctaattcacggaaacaaattctgcaaattttgaacttttgcaggaccgaatgtggacgtccgcaacgctcacagcgtgtatatgcacgtactttaaacttaggtgtacgttgttgtttaactttcatcgaagtttttgccacttagcctgacacctcctaaataatttcggagaaaagggagtctttccagacacccggaaacgttatgccaacattacttaacgaaaggcattcccatttgcgtaagcaattcacgggactcttcgtctgttttcgccgttgttacaatgacaatatccataccgcggactttatcaactttatcgtattcgatctccgggaagatcaattgctctttcagacccagtgtatagttaccacgtccatcaaaagcattactcgatacaccgcggaagtcgcggacacgaggaagcgttacgttgagcagcttatctaggaagaagtacatacgctcaccgcgtaatgtaactttcgcaccgataggcatattctcacgcagtttgaaacctgcgatagattttttagcacgagtgattacaggtttttgacccgcgatcagttgcaaatcgtttactgcagaatccaacactttagagttttggacagcgtcgcccacacccatgttgataacgattttctcgattttcggcacttgcattaccgttgtatagttaaacttctgcatcaaagcaggagcgatttcttgcaggtaacgttctttcattcttgatgccatgaatcatagccctcctttctcattcggttcaattagtcgataatttctccggaacgtttagcaacgcgcactttcttaccgttatccaaaactttgtaacctacacgggttacttttccgctcttcggatcgatgtgcattacgttggaaacgtgaatcggagcttccttctcgataatgccgccttgcggattttgctggttaggcttctggtgttttttcaccatgttaacaccttccacaaggacgcggttctcacgaggataagcagcgatgacacggccttttttacctttgtctttaccgctgatcaccataaccgtatcttcctttttaacgtgaagtttgttgttatgggattccagaacttttttcactcttggcatttcgtacacctcctgtttctaacatcacgagattaagctttagataacttctggagccaaggaaacgattttcatgaagtctttatcgcgaagttcgcgagcaacaggtccgaaaatacgtgttccacgtgggcttctgtcgtcttttacaacaaccgctgcattttcatcaaaaccgatgtaggaaccgtctttacgacgtacagaacgtttcgtacgaacgacaaccgctctaactacatcaccttttttgacaacgccgcctggtgttgcttgtttaacagaacaaacgatcagatcaccgatttgagctgtacgacgtcccgtaccgccgagtacgcggatacacatcagttccttcgcaccggagttgtcggccacagtcaaacgtgtaaatggttgaatcatttagtattcctcctttcagcaatgctgctgatgcattagatgataaccgctttttctacgatttcagtaagtctccagcgtttatctttcgaaagcggacgagtctccatgattttcaccgtgtcaccgattttcgcagtgttttcttcgtcatgcgctttgaattttttagtaaccttaatgcgtttatggtacaagttgtgttttttgtaagtttctacagcaacaacaatcgttttgtccattttatcgctgaccactttaccagtttgcactttacgtgcgttacgttcttcgctcattgttggcctccttcctgattacggacggattgtccatcctatccctaattaaccgattcccaattctctctcacggataatggttttagcacgagctatttctttccgcacatcacggatgcgagtcgggttatccagctgaccggtagctaattgaaagcggaggttaaagagttcttctttaaatccggcaatcttttgctcgatttcagcagaggttaggttgcgaaattcactagctttcatttgcttcaccacccaattcttcacgtttcacgaacttcgttttgattggcagtttgtgagcggcaagacgcattgcttcgcgtgcaatttcctccggtacaccagcaagttcaaacatgatcttacctggtttcactactgcaacccatttttctacgttacctttaccgctacccatccgaacctcgagaggcttttgagtgattggtttgtctgggaaaattttgatccaaactttaccaccacgtttgatgtaacgagtcatcgcaatacgagccgcttcgatttgacggttcgtaatccaagccggttccgtagcttgcagaccgtattcgccaaagttcagagtcgttccgcctttagcttggcctttcatatgtccacgttgttgcttacggtgttttacgcgttttggtaccaacatgattagttgcctccttccttagcagcttgtttcttagccgtaggaagaacctctccacgatagatccatacttttacgccgataagtccgtaagtagtatgagcctctgctgtaccgtagtcaatgtcagcacgcagtgtgtgcagtggaacagttccttcgctgtagccttcagaacgtgcgatctcagcaccgccaagacgtccgcctacttgagttttgatacctttagcaccggagcgcatagttctttgaattgcttgtttcagagcacgacggaaagaaacacgacgttccaattgttgtgcaatgctttcagctacaagaacagcgtccaagtcttggttcttaatttcagaaatgttgatgtgtacttttttaccgccagcaattttcgtaatttggttacgaagattttcaacttccgaaccacccttaccaataaccatacctggtttagcagtgtgaatcgttacgtttacgcggttagccgctctctcaatttctacacgagataaagcggagtctttcaatttatttttcaggaattcacgaattctcacgtcttccatcaaaagatcaccgaagtctttgcctgcataccacttagattcccagtcacggataattccgacacggagtccgactggatttaccttttggcccacacatttcccctccttctacttctcagataccaccaaagtaatgtggctagtacgtttgttaatacgacttgcacgtcccattgcacgagggcggaaacgcttcattgtcggtccttggttcacgtaagcttgcgagataaccaatttgttaacatccaaagaatagttatgttccgcattcgcaatagcggagttaagcaacttctcaacgattggagaagcagatttcggagtgtgacggagaatggcaaccgcctcacctacttgcttgccacgaatcaagtcaacaacgagttgagctttacgaggagcaatccggataaacttagcatgtgcttttgcttccattgtgtaacctcctttcaaacattaaagatattcatttatcttcttgttttcttatcatcagcagtatggcctttgtacgtacgggttggagcgaactcacccagtttgtgtccgaccatgtcctcagttacatacactggcacgtgtttacgaccatcgtaaacgccaaatgtgtgtccgatgaattgcgggaaaattgtagaacgacgggaccaggttttgatcacattcttcttacctgaagcttccatctcttctacctttttaagcatgtagccatcaatgaatggcccttttttcaaactgcgacccatgtggagatcctcccttcaaacatagctattatgcatccgcagatgcctcacgaagttatgcacagtgtgtattacttcgtgcggcggcgaatgatgtatttatcagaagctttatttttcttacgcgttttgtaaccaagtgtaggtttaccccatggtgacattggcgatttacgtccgattggagcacgaccttcaccaccaccgtgtgggtgatcgttagggttcattactacaccacgaacctcaggacgtttacccaaccaacggctacgaccggctttaccgattttgatgagctcgtggtcttggttacctacagatccgattgtcgcgcggcaaactttcaaaatacgacgaacttctccggaagagagacgaacggaaacgtatttttcttctttaccaagcaattgagcttctgtaccagcagcacgaaccaattgtccgcctttacctggtttcaactcgatgttgtggataacggtaccaactggaatgttttcaagtggcagtgcgttaccgattttgatgtctgattcaggtccggagaatacttgatctccaactttcaaacctttaggagcgatgatataacgtttttcaccatcagcatagtgaatcagagcgatgttagatgtacggttcgggtcatactcaatcgtagcaacgcggcccggtattccatctttagtacgtttgaagtcaatgatacggtatttacgtttgtgtccaccaccatggtgacgaactgtaattttaccttggttgttgcggcctgcttgtttgctcaacggggccaacaacgatttctccggctgatttgtggtgatttcctcaaatgtagaaacggacatgttccgtcttgccggggatgttggtttatactttttgattggcactgggtttccctccttacttcaaaaattcaattatacagtttcaaagaactcaagcgttttgctgtcttttgtcaacgttacaaacgcttttttccattcgctagtatatccggaataacgtccgtaccgtttcggcttagctggaacacgaagcgtgttcacgtttttcacttttacattgaaaatagcttctactgcctttttgatctcggttttgtttgcacggatatcgacttcaaatacatatttcaagtcgttcatcatgtcagcagtacgttccgtaataatcggacgttttacaatatcacgaggatccttcattacgcgagcacctcctctaccttctgaactgcttctttcgtaatgatcaatttgtcgtgcgaaagcacgtcaagaacattaataccgtcagcagctacgaatttcacgcctggaatattccgtgcggaaagagctacattatcatcatagctaggagctacaatcaaagctttacgtcccactttgaggttactcaagatggctgcaaattctttagttttaggcgtgctcaacgtgagagcgtccaaaacgataatgtcattgtcaagcactttggatgaaagggctgatttgatcgccaagcggcgaactttcttaggcagtttatacgcatagctccgtggtgttggaccaaatacgataccgccgcctttccattgtggtgaacgaattgaaccttgacgagcgcgacctgtacctttttgtttccaaggcttacgtccaccgccacgaacttcagaacgtccttttactttgtgggtaccttgacgaagggaagcgcgttgcataagaactgcatcgtacagaacgtgttggttcggctcaattccgaaaaccgcatcgttcaattcaacttcgcctacttggctaccatctacattgtaaactgatacttttggcattttgtgttcctcctttcttcagtggttattttttcaccgtttctttaactctaatgagactgtttttcggtccaggaatggaacctttcacgagcaacacgttacgctcagcgtctactttaactacttcaagacgttggattgtaatagtatcatgtcccatgtgtcctggcaggcgtttgcctttaggaacgcggttagcttggatcgaacccattgaaccagggccacggtggtaacgcgaaccgtgtgacataggtccagtgctttgtccccaacgtttgataacgccggcaaaacctttacctttagaaatacccgttacgtcaacgaattcgccttcagcgaaaatgtcagctttcagttcttggccaacttcatattctgcgatgttgataccgcgaacttcacgaacgtagcgcttaggggcagtgttcgcttttttagcgtgacctgcttctggcttgttagcatttttttctttcttatcggagtaaccgatttgaattgcttcgtagccatcgttctcaatgtctttcttttgcaaaacaacacaagggcctgcttcgataaccgttactggaacgacgttaccttcaggagtaaatacttgagtcattccgagtttttttcctaagattgctttcatgttgacacctcttttcctttatacatggtctttgttgtagcttatattacaatttaatttcgatatctacaccggacggcagatccaagcgcatcaaggcatccacagtttgtggagtcgggttaacgatgtcgatcaaacgtttatgtgtacgttgttcgaattgttcccgagaatccttgtacttgtgcaccgcacgaagaatagtaatgatttgtttttcagtaggaagcggaatcggaccggatacaccagcacccgaacgttttgctgtttcaacaattttctccgcggattgatcaagaattctgtggtcgtaagctttcaaacgaatacgaattttttgctttgccattttagtccctccttctatcgcccaattttttatcggacatactccgtgaaaattttctagccactctcccatggcaaaggggccgggtgtgccagtaacctctcacatcatcgcaacgtcacagaacaacattcattattatatagaaaagataggcgtattgcaagcatatttaagaaaaacatttaaacttatcttttctgatgaaatgacttcgtttattgcagtgttaatcttcaatatccaggctgccttgccaatccttctaaacacgtaaatgatgttcatttcgtatgacgcaggttccgaactttaaacataataaaagagttctctatccgatgtcggataaagaactcttccgaagcttcgttacaatacaatgttactcgttccagtacactgttacatatgctttattcagcgttaagccaaattatttttggatagatgctacggaaccggcacctactgtacgtccgccttcacgaatggagaatttagttccttcttcaatcgcgattggggagatcagggaaacagtaacagtgatgttatcaccaggcattaccatttcagtaccttcaggcaagttgatgatgcctgttacgtcagttgtacggaagtagaactgtggacggtaaccagtgaagaatggtttgtgacgtccgccctcttctttagtcagaacgtagatttgagctgtgaattctgtgtgtggcttaacagaacctggttttgcaagtacttgaccacgctcgatttgagtacggtcaacaccacgcaacaatgcaccgatgttgtcacccgcttgagcggaatccaacaatttacggaacatctcaacgcctgttacaacggattttttagtttcttcagtgataccaacgatttcgatctcttcgccgactttaacagtaccacgctctacacggccagtagcaacagtaccacgaccagtgatggagaatacgtcctcgacaggcatcaagaaaggcttgtcagtttgacgctcaggcagtgggatgtaagtgtcgatctctttgaacatctcaacgattttttgagcccattcgccatctgggtttgccagagcttcacgagcggatccacgagtgattggagtatcgtcacctgggaactcatattcgttaagaaggtcgcgaacttccatctcaaccaattccaacaactcttcgtcttcaaccatgtcacatttgttcaagaatacaacaatgtaaggtacgcctacttgacgggagagcaagatgtgctcacgagtttgtggcattgggccgtctgctgcggatactaccaagatagctccatccatttgagccgcgccagtgatcatgtttttaacatagtcggcgtgacctgggcagtcaacgtgagcgtagtgacgagtgtcagtttcgtactcaacgtgtgatgtggagattgtgataccgcgttcgcgctcttctggagctttgtcgatttggtcgaatgcaattgcagcaccaccgtaagttttggacaatacagttgtgattgcagcagtcagagttgttttaccgtgatcgacgtgaccaatagtaccgatgttaacgtggggtttattacgttcgtatttagcctttgccatttgaacgtggcctccttaaaattataattttatgttttcactgaatgaagtgctccgaattgaattcttatgcacttgcatccagtgtgagaaaactactcggtgccttttgttttggcaacgatttcttcagcgatgctcttaggaacttcttcatagtgagagagttccatggagaatacgccgcgtccttgagtaccggaacgaagagttgtagagtaaccaaacatttcagacagaggtaccttagcacggatgatttgagctccactacgggaatccataccttcgatgcggccacgacgggagttcaacatacccattacgtcacccatgtactcttctggaacagttacttctactttcatgataggctcaagcagaactggtttacacttgtctttagccgctttaagcgccatagatccggcaattttaaatgccatctcattggaatcgacatcatggtaagatccgtctacgattgtagccttaacgtcaacaagcgggaagcctgcaataacgccgtttttcatttgctcttcaatccctgacagtgcaggttgaatgtattctcttggtacggaaccaccgacaaccttactttcgaactggctgcctgtacccggctcgagaggttcgaattcaacccatacgtgaccgtattgaccacgaccaccggattgacgtacgaatttaccttcaacgcgcgctggagcacggaatgtttcacggtaagctacttgtggtttacccacagtagtttcaaccttgaactcacgacgcatacggtcgatgatgatatcaaggtgaagctcacccatacctgccaagatcgtttggcctgtttcttcgtcagtatgagcacgaagagttggatcctcttcagtcaacttaccgagagcaacacccagtttatcctggtcagctttggttttaggttcaacagcgatttcgataaccggatcagggaagttcattgactccaggataaccggatttttctcatcacatagtgtatcacctgtacctgtatctttcaaacctacggcagctgcaatatcaccggagtaaactacagtgatttcttgacggctgttcgcatgcatttgaaggatacgaccgatacgctcacgtttgtttttagtggcattcaatacatatgatccggattgaagaacaccagagtatacgcggaagaatgtcaatttaccaacgtaagggtcagtcataattttgaatgccaatgcggagaatggctcttcatcggatgacttacgaattgcttcagttccatcttcaagatgtcccgtgatcgatgcaacatctgttggagctggcaagtagtcgataacagcatccaacatcagttgaacacctttgttacgatatgaggatccacagataactgggaagatcttaacatctacaacacctttacggagtacggttttgatctcatcaattgtgatctcttcgccttccaggtatttcatcgtcaaatcttcatccagttcagcaacgcgttcaatcaactcgttgcgaagttcttcaacttgatctgcaaactctgcaggaatgtcggtttcttcgatatcttgaccaaggtcatctttgtacatatgagctctttgtgcaacgatatcgatgatacctttgaaatcattttcagcgccgattggaagttgaatcgcaacagcgttcgcttgaaggcgatcacgcatgtcagatacaacgttcaggaagtcagcaccgatgatatccattttgtttacatatgcgatacgaggtacgccgtacttgtcagcctgtctccatacggtttcggactgaggctcaacgccttctttcgcactgaatacaccaactgctccgtccaatacacgaagggaacgttcaacttcaacagtgaagtcaacgtgtcccggggtatcaataatattaacgcggtggcctttccaagcagcggtagttgcagcggaagtaatcgtaattccgcgctcctgttcctgttccatccagtccattgtcgcagcgccttcgtgtacttcaccgattttgtgcgtacgtcctgtgtaaaacaggatccgctcagttgtcgtggttttacccgcatcaatatgagccatgatcccgatattacgtgtattttttaaggagaactctctagccatgaaatgggtctcccttcaaaattgaagtttttttattgtgaactgaatcctaccaacggtagtgagcaaacgctttgttcgcttcagccattttgtgcgtatcttcacgttttttaacggaagcgcctgtgttgttggaagcgtcgatgatctcagccgccaaacgctcttccattgttttctcaccgcggttgcgggagtagttcacgagccaacgtaatcccagagcagtacgtctctctggtttcacctcgattggtacttggtagttggcaccgccgacacggcgagctttaacttccaggactggcatgatgttcttgattgctgcttcaaatacttccatagggtcattacccgtacgttcttgaatcaacttgaacgcattatacagaatgctttgagcaacaccgcgttttccgccgatcatgatgcggttgattaaacgagtaaccaacttgctgttatataacggatcaggcagaacgtctcttttcgtaactggacctttgcgtggcatggatatccccctttctttcttgttcagcagatcctgtaccttccagacttagaccagaaggctttcaggctatctgcctataatagtttaggcttttttagcttttggacgcttagcgccgtatttcgaacgagcttgcatacggttgtttacaccagcagtatcgagagctccacgaacgatgtgataacgaactcctgcaaggtctttaactttacctccgcggatcaataccacactgtgctcttgaaggttatgtccgattcccgggatataagcagtaacctcgagacggttcgtcaaacgaacacgggcatacttacgaagtgcagagtttggtttacgtggagtcattgtacctacacgagtgcagacaccacgtttttgtggggcactgatgttagtagattcacgtttcaaagcgttgaatcctttttgcaaagctggagattttgacttctcaacttttgcttgacgtcctttacgaaccagttggttaatagttggcatgtgattgccacccccttcctcaaatattcatgtttctttataaacctctttgcactaagtccacagacccaggcggttcataaaaagacaaatgaaaagtttttgccttggagaatccttaaaagttctcggacaaaaacgttccttaccctatgattttacgacagcagccatagctgctcctactccaatcccgcaagccttgccgagatttttcattgtatccactttcgtgcattttacattgtgttgttcacacaaagcaatgattttggaagtaagctgcggatcactatcttctgcgacatagacttcagaagccatacctgtctgcaccatccgcatggtctgtttggtacctattttgacatgagcatcttgcaaggctttttcattagacattgtgtattcctccgaatagaaccatgtacaatcagctgcccacgcacctttgatatattagcatctagcgcaagcattgtcaatgctaatcctaaaacattttttaaaagtttacgtgcatcaggattcgtccgcctgtatcatacaaacgtccgtctcctgacgcacaaaactttcactctcctctaatgaggagaaatatatttaatcaaccgaaactggctcaagttcttctactgaagattggccatcttctggctcagcaaatttgatgctgcggtaacggtgcatacctgtacctgcaggaatcaatttaccgatgattacattttccttcagaccgagcaactgatcgactttacctttgatcgctgcatctgtcaatacacgtgtagtttcttggaacgaagccgccgagaggaaggagtctgtttctagggatgctttcgtaataccgagcaggattggtttagcaaccgccggctctttatcactaagaatcgcaattttgttagctctttcgtactcatgcatatccacgaacgatcctggcaacagcgttgtatctcctgcatctacgatacggattttacgcagcatttgacggatcataacttcaacgtgcttatcgttaatttctacgccttggttacgatatacgcgttgtacttcctgcagaatgtagttttgtacaccacgtatacctttaatccgtaacatctcttttggatcaatggaaccgtctgtcaactcgtcacccgcttcaacttccgcgccttcgcttacgcgcacacgggaaccgtaggtaacggcgtatactttggattccgcttcaccttgaatttcgatttcacgacgatctttcgcttcgcgaatctctttaaccacaccatcgatttcactgatcgttgcttgacccttaggattacgagcttcgaacaactcctggatacgtggcaaaccttgcgtaatatcgtctccggctacaccaccggtatggaacgtacgcattgtaagctgtgttcctggctcaccaatggactgtgctgcgataataccaactgcttcaccaatctccacgtgtttaccagtcgcgaggttgcgaccataacacttcttgcagacaccatgacttgcacggcagctgaggacggagcggatttgcaatttagtaatacctgctttgataatcgcttctgctttatcggagtcaatcaattcattgcgacctacaatgatttctttcgtttccggatgacgaagagtctcgaagcagtatctgccttcaatacggtcgtagaggtcttcgataacctctttaccatcctgaatacgacttaccgtaaagcctttatctgtaccacaatcatcatcacgcacgattacgtcttgggctacgtctacgagacgacgagtcaggtaacctgaatcggctgtacgcagggctgtatccgccaaacctttacgcgctccgtgagtggagataaagtactcgagtaccgtcagaccttcacggaagttcgatttgattgggagttcgataattcgaccggatgggttggccatcagaccacgcataccgcccaattgggtgatttgcgatttgttaccccgtgctttggagtctaccatcatcatgatcgagttgtaacgatccatggacttcatcagaatctcagtgatgtcatctttggattttgaccagatatcaatgatacggtcatagcgctcctcattcgtaatcagaccacgacggtactgattcgtaacgatttgtgctttttcctcagattgtctaagaatttcaaacttctcaggtggaacgataacatcagataccgcaaccgtaataccggcacgtgtagagtatgtgaaaccaagttgtttgattttatccaaaataacggctgtttccgttgtgtgataaatttcaaaacaacgtgcaatgatggagccgaggtattctttaccgacaccgccagccagaggagcattcataatagcttctctgagatcagcacctttttcatatacaaatgagtgatctgcagtaccttggtacaggttagcacgagtcgcatcattgatatacgggaagcttgccgggaaaatttcattgaagataattttaccgacagttgtcagcaacattccttcttgttgttcttccgagaagcttgttttaccaagcgccttaaccggaatagctacacgcgcatgcagaccagcagtaccacgttggtatgccgatacagcttcgttaactgtacgcaagatcatacctgtgcccttttcttccttgttatccatagtgaggtagtaagaaccaagcaccatatcctgggaaggagtaacaaccggtttaccgtctttagggttcaaaatgttacccgatgcaagcatcaggatacgtgcttccgcttgagcttcagcggacaagggaacgtgcacggccatttggtcaccgtcaaagtcggcattgtatgccgtacatacgagcgggtgaagacgaattgctttaccttcaacgagaatcggttcaaatgcttgaataccgagtctgtgaagcgtaggggcacggttcaacagaaccggatgctccttgattacttcttcaagaacatcccatacttcaggacttacacgctcaactttacgttttgcgctcttgatgttgtgggcaagccctttatttacaagctctttcataacaaaaggcttgaacaattcaagtgccatatcttttggcagaccacactgatacattttcaggtaaggtccaacaacgataacggaacgaccagaatagtcaacccgtttaccgagcaagttttgacggaaacgtccttgtttacctttcagcatgtggctgagagatttcaatggacggttaccaggacccgttaccgggcgtccacgacgaccattatcgatcaatgcgtcaacagcttcctgcaacatccgtttttcattttgcacgataatatctggcgcgcccagatcaagcagacgtttcagacggttattccggttgattacacgacggtacaagtcattcaggtcagacgttgcaaaacgtccaccatccaactgtaccattggacgaagttccggcgggataacaggaagtacatccatgatcatccactctggcttgttgccggagttgcggaatgcttcgataacttccagacgtttgattgcacgattacgacgttgtccttgcgcagtccggagctcttctttcaggaactcgagctctttgtctatgtcaaggtcttgaagtaattttttaaccgcttctgcgcccatgccagcatggaaaccataaccgtatttttcacggtagctgcggtattctttctcggacaacagctgttttttctccagtggagtttctcctggatcagttacaacatatgatgcaaaataaataatctcttcaagagatcttggagacatatccagagcaagacccatacggctcggaatacctttgaagtaccagatatgcgataccggagcagcgagctcaatgtggcccatccgttcgcggcgtactttcgcacgtgttacttcaacgccacaacgatcacagacaacgcctttataacggacgcgtttgtatttaccgcaatgacattcccagtcttttgtaggaccaaaaatcttttcgcagaacagcccttctttttccggtttcaacgtacgatagttgatcgtttccggttttttcacttctccgcgggaccaagaacgaattttctctggggaagcaagcccgatcttcatgtattcgaaattgttgacgtccaacaaggagcaaccctccttaaccaattcctgtaatctaggttacgcccactccggccgaagccggagcaagacgtgagcctgatgaaaaacgccggtcatcatgcgctcgaagcggtttattccgctccgacctctgtaccctcaaggttgaggctgagcttatcgctcgcagcgtcatcttcatcgtccatttctctcatttcaatctcttgctcatcttcactcaaaatcttaacgtccatacccaagctttgcagctctttgatcaatactttgaatgattcaggaacacctggttccggaacattctcacctttgacaatggattcatacgttttaacccgaccaacaacgtcatcggatttaacagtcaagatttcttgcagcgtataagcagcaccgtatgcctcaagcgcccatacttccatctccccgaaacgctgtccaccaaattgggctttaccgcccaatggctgttgcgtaacaagtgagtaaggacccgtggaacgggcatggattttatcatcaaccatgtgtgccagtttgatcatgtgcatgacacctacggtaacttcacgttcaaactcttcacctgtacgaccatcatacaggacagttttaccattacgttgcatacccgcttcttccatcgtatcgaagacgtcatactccttcgctccgtcgaatacaggagttgctacgtgaatacccagttgcatcgccgccatacccaagtgaacctcgagtacttgaccgatattcatccgggaaggtacgcccagtgggttaagaacgatctgaaccggtgtaccgtctggcaggaaaggcatatcttcttccggcaagatgcgggccacgacccctttgttaccgtgacgtccggccattttatcaccctcggaaattttccgtttttgagcgatatatacacgaacgagttggttaacacctggaggcagctcatcaccgttttcacgggtaaatactttcacgtctactacgataccgtcagtaccatgtggtacacgcaaggaagtatcacgtacttcacgtgctttctcaccaaagatcgcatgcaagagacgttcttctgctgtcagctctgttacacccttaggtgttactttaccaaccagaatgtcgccagcactgatctcagcaccgatgcggataataccgcgctcatccaagttacgcaacgcttcttccccaacgttagggatatcacgtgtgatctcttcaggtccaagcttggtatcacgtgcttctgactcatactcctcgatatggatggatgtgtatacatcttccttaacgagtttttcactgagcaagatcgcatcctcgtagttgtaaccttcccaagtcatgaaggcaacaacaacgttacgtcccagagccaattcacccatttccgttgaaggaccatcagcgaggatatcgccagctttgacagcggcacctcttttaacaatcggacgctggttaatgcatgttccttggttcgaacgcataaatttgtgtaatttatatttaacgatatcgcctttaacttcctgaccgtccacttcttcaacacgacggacccaaatctcgttcgcagtagatcgttcaataattccgtcataatcggagacaatacatacaccggaatctttcgcggctttgtgttccatacctgttcccacaagtggtgctttaggaatcaaaagtggaacggcctgccgctgcatgtttgatcccatgagcgcacggttggagtcatcgttctcaaggaacggaataagcgctgtagcgacggatacaacttgcttaggagatacgtccatgtagtcaacgcgctcactcggcatcgtaaggatgttatccgactgtttgttataacgtacaatgatcgcttcttcttcaaatgtactatcttcattcagcttcgcattcgcttgcgcgataacatagttgtcctcttcgtccgctgtcaggtaatcaatttgctcggttacaatacctgtcttcggatcaacccaacgatatggagcttcaataaagccatattcattcacacgggcgaacgtagacaaggagttgatcaaaccgatgtttggtccctctggcgtctcgattggacacatacggccatagtgggatggatggacgtcacgcacttccatacctgcgcgctcacgcgtcaaaccaccgggtccgagtgcggacaaacgacgtttatgtgtcaactcacccagcgggttcgtttgatccataaactgtgacagctgagagctaccaaagaactctttaatggatgcaataacaggacgtatgttaatcaaggcctgtggtgtaattacgttagcatcctgaatggacattctctcacgaaccacacgctccatacgggacaaaccaatacggaactggttctgcaggagttcacccaccgaacgcaaacgacggttacccagatgatcgatatcatccgtgctaccaattccctgcagaaggttaaggaaataactgatggacgaaatgatatccgccggtgtcacgtttttaacggacttgtcaatgattccattggcaatcagtttgactactttaccatcttcagttggtgagaacacatcgatcgtttgcataggaacatcattagcatccagaacaccgttacccacgtgatacgtgcggaaaccaacgctcttctccagatacggcatgatttcatccaacaagcgacgatccaccatttgacctgcttcagcaataatctcgcctgtttcagcgtcaacaagtgattcagccaaacgctggttaaacaaacggtttttgatgtgaagctttttgttcattttgtaacgacctacattagccaggtcataacgttttggatcaaagaaacgtgctacgagcaagcttttcgcattatcaagcgttggaggctcgcccggacgaagacgctcatagatctcaatgagtgctttctccgtggaatccgtgttgtctttgtccagtgtgttgcggatatattcgtcattaccgagcagatccagaatctcagcatctgtgccaaaaccaagtgaacgcaggagaaccgtaaccggtattttacgtgtacggtcgatccggacataaacaacatccttcgcgtccatctccagttccaaccaagcgccgcggttaggaataactgtagcggtatacgtttttttggcgtttttatctactttggtactgaagtaaacgctaggagagcgaaccaactggctgacaataacccgttccgcaccattaataataaatgtgcccgtgttggtcatcagcgggaaatctcccatgaatacttcctgctctttgacttcgccggtttccttattaatgagccggactttgacccgaagcggtgctgcatacgtaacgtcacgctcttttgcgtcgtctactgtatacttcggttcaccgagactgtaatcgataaattccaaaatcaagttacctgtaaaatcctggatcggcgagatatcctggaacatttcgcgcaacccttcctccaaaaaccaatcataggatttttgttggatttcaatcaggttcggaacttcgagtatctcgttaattcgtgcataactgcgccgagtgcgtcgaccatattgaacaagatgtcctgccaacttaaactcacccctcaatgtctactcactttaaaaatttcgttgcgaacctctgtttgtaaccttataatggtacacatacagagcaaagcaatgcatccacaaataaagaaaagcccttactcgaaatgtcgttcgaaaaaagagcaactttgatcggcggatgtctttccaaatcattcttatccccagtttgcccaaaatgtacatattatacgccaaacgtaggcataataagcccgttcggcgtaaaaaaagttgacatttttagttagctaaagccaagtagggcatcttaatactgacattttacaactataccacgacctgaatttcaagtcaatagtcctattgcaaaaaaaatgatcccctgcttactttacaaactcggattcagcttttagtagatacctattccgatttcaccgctttgaaaatccgatagcctttatccttcgtcacttcttccactcttccaaacaaagattccaatttcgctttcgctgacggtgctccttgtttcttctgaatgacaatccacaacgaaccgcccacctttagatggcgatgtgcctgttcgaaaatagtatgaaccgtccctttcccagcccgtataggcgggttggttaggataacgtcaaaatcttgctttttcacttcagccagtagattactttgcaataccgtaacattgttaattccgttcgcttttgcattttccctggaaagttcaacggctctctcgttgatatcgatcatggtgacatgcccatccggtacaagtttggctgctgtaagacccattggcccgtatccacaacccacatcgagaacatgagcccctgatggcaactctatcgcatcaatcaatactctgctgccataatcgattccgtttttggaaaacacaccggcatccgtcacgaatcgcagactgaatccgcgaagaaccgcttcagttgctctgcgatcatgcgccacttgcggtttgtccgaataataatgattggacatgccctcactcactttccatttacaattacagcaacaaaccccttgatataagtcaaggggtttgttgttttgttcatttagcttgtaatagctaaattatttaacttcaactgaagcgcctgcttcttcaagcttagctttaaccgcttctgcttcttctttagcaactttttctttcaatgcttttggagcgttgtcaaccaattcttttgcttctttcaggccaagacctgtgatttcgcgaactgctttgataacgttgattttggaagcaccagcgctagtcaagattacgtcgaactcggattgctcagcttcagcagaagctactgcacctgcagcagctactggagctgcagcagttacgccgaattcttcttcgattgctttaacaagatcgttcaattccagtacagtcatgcctttgattgcttccaagatttgctctttactcatgagtgaacctccatatataatattattttttttaattcatttgccgcctaagcagcattcagatcaagttgcttacgcgccttgttcttctttttctgcaactgctttaaccgcaagcgcgaagttgcgcactggcgcttgaagcacgctgaggagcatggagaggagtccatcgcgggatggcagttctgccaatgccttaacttcttctactccgattacgcgaccttctacgactgcacctttcaattccaatgcatcgttctttttcgcgaagtcgttcagaattttagctggagccacaacgtcatctacgctgaatgcaattgcagtaggacctgtaagaacattatcgagttctgtcagttctgctgctgcagctgcacggcgaagcaacgagtttttcagcacttggaattcgatccctgcttcacgaagttgcttacgcaactcagttacttgggcaacgttcaatccgcgatagtcaacaacaacagttgtaacgctctcgcgcaattttgctgttactgcatcaacggattcttgttttgcttgaatcacttttgcgtttgccaatctgtacacctcctgatcaaatttatcccattaagaaaagcctccgtagaatcacgaaggcttgatatatactcatcatcgatttgcatcgttctaagttctataatcacacctcggcaggaaattaagccaaatggcacctactgtctacggcaagcatattcaaatgtcaacggtcagtcactcggactcacaacttttatatcttatcaaaaacaggacaagcctgtcaagagatattatctaaaagctgctgcgttcacgcgtgcgccagggcccatcgtggaagaaagactaacattcttcagataaacaccttttgctgccgctggtttagcacgattcagagcttccatgagagctttgaagttctcattaagttgctcagaagagaaagaagctttaccaatcggtgcatgaatttgacctgcacgatccagacgatattcgattttaccggctttaatttcttgaacagccttagttacatcgaaagttaccgttccggctttagggttaggcatcagacctttaccgccgagcagtcggcccaatttacctacttcactcatcatatctggtgtcgctacgcagacgtcgaattcgaaccagccttgttggattttgttgatcatgtctgcatcaccaacatagtccgcgccagccgcttccgcttctttcgctttgtcaccttttgcaaataccaatacgcgttgtgttttacctgtgccgtgtggcaagacaacaacaccacgtacagcctgatcttgcttacgagggtctacacccaaacgaactgctgcttcgattgtttcatcgaattttgcagtagctgcctttttcacaagctctacagcttctgaaggctcgtaagttgcttcgctgtcaatcagcttagcagcttccaggtattttttaccgtgtttagccatgttttattcctcctttgtggtgttagcggatatacctcccacatcaaccggtcgcgaatcgaccggttttacgaagccatgtttcttatgaaaattagtcttcgatggtgatacccatgctgcgggcagtaccttcgaccatacgcatagcggactcaacgtctgctgcattcaggtcaggcatttttgtttctgcgatttgacgtaccgcatcacgtttaacagtagcaacttttttcttgttcggttcgccggatcctttttcaactttagctgccactttcaacagaactgctgctggtggagttttagtgatgaaagtaaaggaacggtcctcgaatacagaaatttcaactggaataatcaatcccgcttgatcagctgtacgagcgttgaattctttacagaatgccatgatgttgacacctgcttgacccaaagctggacctactggtggtgctgggtttgctttacctgctggaatctgcagttttaccattttaataacttttttcgccatgattgacacctccttgcaaaatagtggttaacgggtttttcaaccctcccacaagaaacttgaagaaactatatcttctccacttgcgtgtattccaactcaagcggtgtttcccgtccaaacatgttcacgtgcactttcaacttgcttttctctaccaaaatctcttccacggagcctacgaaattcgcaaaaggaccgactttaatacgcacggattccttaatatcgaactcaattttcggcttaggttcaaccattcccatgtgcttcagaatttgttccacttcttcaggcaacaatgcagttggtttggacccagaacctgtcgaaccgacaaatcctgtaacccctggtgtgttgcgaacaacataccaagaatcatccgtctgtaccatttccaccaagacataaccggggtaaactttacgcataacggtttttttcttaccgtccttgtttaccacttcttcttccataggaacaagaacgcggaatatcttgtcttccatgcccatagactctacgcgtttttccaaattggctttgaccttgttctcataccctgaataggtatgaacgacgtaccatcttttttccatatcaagccaccggaacccttcttaaataatcgcttcgatcacaaaggagatgccaatgtcaatgacccaaaaaaacagcgtcataaccacaacagtaccaagtacgatcaatgtgtagttggtcagctctttacgattaggccagcgaacttttttaagttcagcccagctttctgagaaaaaggaaatcagagatttgaaacttcgtttcacgccgacacctccaaaaactatctggtttcgcgatgagaagtctgctcgttacaaaacttgcaaaatttcttcatctccatgcggtcggggtgattacgcttgttttttgtcgtagtgtaatttctttgtttgcagttagtacaagccaaagtaataattacccgcatgatgtacacctcccgaagacttccacattcaagcagagtctctaaattgatcctgaaaaaaagccataaatttaggcctacctaaaacactttatcacaagggtataaccatgtcaatgaaagaatagtctttcattcattgggtattacttccgtacaacgtacattcgtttctcatctctgtttttctcttctcctgcttggaccgagcgattactagtataaacattcttagattttataaacttgagacactaaaaaaagactcaaacaccgagccttttccgtcaacgacaacatgtgtttaattatctcgaacttccaggtacttttcaagtttgcgcttgacgcgctgaagtgcattatcaatggacttcacatgtctgtccaaatctactgcaatctcttgataagatctcccgtccagatacaacatcaatactttacgttccagatcactcagaatctcggacattttatcttccaggcccacaaactcttcctgattgatgataagttcttccggatcactgacctgggttccacaaatcacatcgagtaacgtacgatcagactcttcgtcataaataggcttgtccagagatacataagaattaagcggaatatgcttctgacgtgttgctgtcttaatcgccgtgatgatctgtcttgtaatacacagttcggcaaaagccttgaacgaagccagcttgtcccctttgaaatctcgaatggatttgtagaggccaatcattccttcttgaataatatcttcccggtctgccccaatcagaaaataagatcttgccttggcgcgtacaaagttacgatatttgttaattagaaactctaacgcttcgctttcgccttcacggaaagcttcgacaatgtcttcgtcactttggtaatcatacttagataacatgatatctttgaggtcgacactcacagacaatccctccggctgcaacgcaaggtaccccgttactctactctatgaaatataggatcagtatatatgatggtacctcacaccgtcaaccacgctctgcctaaaaaagaacatcaataacataaatgtcaagagtttcaatattctaaattttgtaaaaacgtgctgttattcccggcgccatcgctcaaactcttttaatacatcgggacttaacttacccccgagtgtgttacgcgtggtcttcgcctgatcttcttccagtcgtttttttaattctttttcgttctgctcaacttcaattagcaactcccttgcagatacgcgtagcgctccctgtccaaaaataacatgttgctctaccatatcgctcgtagccacatagatttggcgtcttcgcatgcttagttcccgaacgagtctttcaatgcattcgtctgccgtctctttttcctttgtaaaatagatctgcactttgctctgagtaaaggatttaccgagtccaggcacgaggtaggcgtcaaacacaacaatgactcgccggccggagaaagcctggtagtctgcaagacgaaagagaagcctgttacgtgcctcttcgagcccactttccgccagtttggttaattccggccagtcgccaatcatgttgtacccgtctacaagaagcacatcacgggaatcagccataccttctattcctgcgcttgacgcgagcggagcacttcgtacatgacaacccccgctgccacggaagcattcagggaattaatctgaccttgcattggtagtttgataagcacatcgcatttctcacgaataagtcgtcccattcccttgttctcatttccgattaccaatgccacagggccagtaaagactccattaccaaagacaccttcatgagccgtgacatctgtccctacaacccatacaccttcctctttgaggcgatcaatggtctgtccaagattacttacccgagccactggcacgtactccacagcgcctgctgatgttttggatactgtcacggttaccgctgccgagcgacgtttgggtacaatgacgccatgcgcacccgtgcaatctgctgtccgcaaaatggaccccaggttatgaggatcttcaatctcatccagcagaatcaggaaaggatgctcattcttcgcttttgctgcggcaagaatgtcttctacctccacataagcgtaaggtgctgcttgagcaactaccccctgatgctgaatgcctggtaccgtttgatccagcttacgcttgtccacgtgttgaatgacaatacctagttttttagcttccgagataataggttgagtcagatgtttctgtgctgtatcggcaatccatattttattaatggtccggcctgaacgcagcgcctccgtcacggagtgtttaccggcgatccattcttcttccatcgttgttcgatcctctctgtaatgcattgttttgttgaaatttctatttttttgtcggcgatggcggttgttgttccgcgtgctcaatgccaagcccgatcagttcaatcatgcgatcatgatgaccactgctatagaggtaaccaatgagacattcaaaagccgtagcatgtctgtactccaatacatctgcatttttgggtacactacccgatttggcattccgcccttgccggacgatatcccgttcttcctctgacagttcatcctcaatcgttgtaagtatgcggctctgtgccttcgctgataccaacccggttgcacttcggtgcaaatgattgggacgcatgttggccttcgacaacagatattgacgaacagctacctcatataccgcatcaccaatataggccagtgcaataggtggaatcaacctcgcaggtctggaaggaggataagggaaccaccctccctctgtgacctgctcctgttgttttggtgtatttggatgtccttcgctcatttgcgccgccatctcatgccctgcgccgtatcttcaagcagaatgccacgtgcagacaattcatcgcgaatttcatccgctcttgcccagtttttggacttgcgcgcttctacacgctcttcaatcagacgttctacttcctcatccagaagttctggctctgcgtcagtatagatgcgcagcacagcattcaattcactgaacaactcgaggagcgcgtgaatgtctgccgcattaactacttcttgctgcaacagttggttggcttcacctgcccactcaaacatcgcagtgatcgcatcaggagtattgaaatcatcctgcatcttttcgtgatactgctgacgaatttggtcgagtcttgccgcaaactctactgtgatatcctgatctacagtcaccgcattcagacgatgattcaggttacctaccgcatttgcaatccggtccacactgttctgtgcctgctccatcgtatcatccgtaaagtttaatgggttgcgatagtgggtagacaacatgaaataacgaatcgcttcgcgtttatattgattccgcaagtctttaaccagaacaccattaccgagtgatttcgacatcttctcgttatcaatccggatgaatccattatgcatccagtagttcgcaagtggtttacctgttaatacctcggattgggcgcattcgcactcatggtgcgggaactgcaaatcctgtccacccccgtgaatgtccagtgtatccccaaggtactccctagccatggcggagcactcaatatgccagcctggtcgaccatcgccccaaggactggaccaatagatctcacctggtttggcagccttccagagcacaaaatcttcgggatgctctttgcgctcgtccacacccacacggattccaaattgcagctcctgcaggttttgttttgaaagtttgccatattcgctgaatttgcctgtacgataatagacgtcaccgccattttcatacgcaaatcctttttcaaccaactcacggataaagtcaatgatcagcggcatgttttccgttactctcggattgctgcttgccttgggaatacccaatccctcaatgtcttcataataggcagcaataaatttctcagccacgtgaggaacgtctgttccaagttgttctgctttgcgaatcaacttatcgtccacatccgtgaagttcaccacatagttcacatcatgtcctgtctgttccaggtatcctcgaaccgtgtcgaaaaagataaccgggcgtgcattcccgatatgaatgtagtcatataccgttggtccgcagacatacattttcactttccctggctcttggggaacaaatttctctttggtacgactcatcgtattataaatctgaagcgtcatggtcacttatcctttcatcctatactgcctttatttattgtatcacgtatcacgcacagtctcattttcacgggcattttgcagtgtacgtacttcttcctgcaatcgttcgagttctttttgcataccgcgcaaggagtcaacgaccggatcgggcaattgctgactgaggcgatctacccgtcggccatcctgtttaacaattctacccggtatacctaccacggtactattggaagggacctccttaagcacaacggagttcgcaccaatgttacactgatcccccacgctaaatgaacccagcaccttggctccggatgagataaccacattattaccaatggtcggatgtctctttcctttttctttccctgttccgcccagggtaaccccctgatagatcacgacatcatcgccaatctcacatgtttctccaataacgacgcccattccatggtcaataaacaaccgatttccgatcgtagctccaggatgtatctcgattcctgtcataaaacggctaacctgcgaaatgaaccgggcaaccgagaaccatcttcgcttgtataaaaaatgagcgatccggtgtgcccatatcgcatgcagccctgagtaggtgaataccacctcaaaccaacctcgggccgccggatcgttttcaaacaccgcctggatatctgatctgatcttcttgaacatgctcgttcccctcttgttcaggttcccgtcctccggcttaccggacggcgcgttccttggtagtgtactgcacactcgcctaaacaaaaaaacgcccctgcagcatttagctgcagaggcgtttatcgcggtcccactctgctcggtccattcttaaatagaatgagccctcaagcggtttggtaacggaaaccaatcgtcacaacctatcctaacgttttcccatgtcatgatcgacaaaggcggggccggattcggctgtgcagctcacgggcgcatttcgactgatggacagtggatggttcacagccaccgcatccaaagaaatctctctttgctacgggaccatcctctctgaatctgtccgggtcagtctactcctcccgatctttgctgttctattagataaatcatatcaattattcgttgtgttgttattatagcgaaaaggcctcagactgacaacagcctcctacgtaatctatccatcgtaggactgtgttcagattccaaataaacggaatgtcttcgactaagattattttacttgtgcaagcaaacgttcgatcaccgtatcacggcccagcaggacgatcgtttggttcagatcccgtccatgcgtctgtccagtcaaggctacacgaattggcataaagagctgtttgcccttaaagccggtttctttctgtacttccttgatcaatccagccattttgcttggagtaaactcttcgctcgcctgtactttatccgcaaatgccttcagtacagttggcacctgctcctccgcaagcactgcttctccttcactttcaagctccagattggaacggaagaatacttccgacaattcgacaatatcggaggcagaattcatctgctcttggtacaggtgtaccagagtataagcccattctttttgttcagcagacagctcggaagaaatacgtccagccttttgcagatgcggaatggccatttcggcaatacgttccgggtcagcatgtttgatatagtggttgttcaagtgcgccagcttgtgggtatcaaataccgcagggctcttggacagacgtttcgtatcaaaaatggagatcagttgctcttgcgagaagatctcttcttccccttccggcgaccagccgagtaaggaaataaagttaaacattgcttcaggcaaatagccgagctgatcatactgctcaataaactggataacggactcatcccgtttactcagcttcttgtgattttcattcacgatcaacgtcatatgaccgaattgcggtggctcccagccaagcgcttcatagatcatcagttgacgcggcgtgttcgagatgtgatcttccccacgcaggacgtgggagatcttcatcaagtgatcatccacagcaacggcatagttgtatgtgggaatgccgtcttttttcacaatgacgaagtcaccggattccttgctgttgaacgagattgtgcctttaaccatatcatcaaacgtatatgtgcgctcttccggcacacggaaacgaatactcgctacgcggccttccgcttcaaacgcactaatttgctctggagtcaggtcacggtgtttgccagaataacgcggtgtttctccacgtgcggactgttcctcgcgctcttgctccaattcttcttccgtgcagaagcaacggtaagccagacctttatccagcaattcctgcgtatatttacgatagaggtccagacgttccgtttgacggtatggtccgtattctccgcctacatcaatactttcgtcccacttaattccgagccatttcaggtatttcagttggctttcttcaccacctgcaatattccgtttcacatctgtatcttcaatacgaataatgaatttaccgttattatgtttggcatataaatagttaaacaacgccgtacgggcattcccgatatgcaggtgtcccgttgggctcggcgcgtaacgcacacgaatatccgtgctcatatgatcccctccgtcactaattgattgatgatatcacacacgtacaaggcaaacaacggattgagcggcaatgccctctccccgtcccgggaatcccagttgctctgtcgttgttgctttcacgttcacctgtgttacatccgcttccagtgccttggcaataacctcagccatctgtgggatataaggagccatctttggcttctgggcaataatcgttgaatcgatattccctagcttatacccgcgatccttcacaagctgccatacatgttccagcaatttcaggctgtcggcatctttgaattccggatcggtatccgggaagtgtttgccaatatccccaagtgccagcgcacccaaaatggcatcactaatcgcgtgcaacagcacgtctgcgtccgagtgacccagcagtcctttttcataaggaatcgttactccgccaataatacacgggcgtccctctaccagctgatgtacatcaaatccctgtcctacacgtatcatcgcttcttctctccccccagcaaaaacgcagcatattgcaaatcttccggcgttgttaatttgatattggtataattgccttccacaaccttgaccgacattccctgacgttcagccagcatggcatcatctgtccccagaaatccgtcctgctcggctgattcgtaggcggagagcagggaagaaagacgaaaagcctgcggggtttgaatgctccacagactgctgcggtctggcgtcgccgtaacgactccttccgcattcacttgtttgatcgtatccttcacgggaacggccagtacagctgctccaccaccggacatggcggccgccatgcatcccttgatctgctcatggttcacaaaaggacgtaccccgtcgtgaacgaggacccaatccgtcccaagggcctcaaggcctttatggacagaatgttgtctctctttccctccggggataacacggacacgtgaatccagttggtattcttttacccaatcctggcagcgttcaacatctgcggttcctgtgaccagcaccatctcgcggatctcgtccagcgcagcaaatacctcaagcgtatgtatgaaaacgggcttgtcctgcagcaacagaaactgtttgctctcggtcgtccccatccgggttccgcgacctgctgccacaatgacaacgccccaccctttatccatgccgcaatccctgccttgtctgtcagtttatcgtccaaagatatacaatatcattcaacgatacactacccatcataccgctttattgggctttttccaacagtttcggcttggcaaaaatcattcgtcccgctgaagtctgcaacacactggtcaccagcacttccatcatcatgccgatatactcgcgtccgccttccacaacgatcattgtgccatcatccagataggctacaccttgaccatgctccttgccatccttgatgatctgcaccatgatctcctcacctggcagaacaaccggcttaaccgcattggcaagatcattaatgttcaacacagatacaccctggagttcgcacactttgttcaggttaaagtcattggtgaccactttaccctgaagcactttagccagtttaaccagtttgctgtccacctcggagatttcctcgaaatccccctcgtagatcaggacttttacatcaagttccttctgaattttgttcaaaatgtccagtccacgccgtcctctgttccgcttgagcagatccgatgaatcggcaatatgctgtaactcctccagaacaaattccggaattacgatcgtgccttcaataaatccggttttgcatatatcagcgatacgcccatcgataataacactggtatccagaattttatgttcttccatccgtctgtcctcgtccacctcgggatgaccccatcgtccagacatccagaaggcccccagatcgtctttcttcgccatggcaagggtataaccggaataagcactaatcaccgtcagcgctacttgcagcacttctcctgccgtccccatccatcccacaacagggtaaagtaacaaggccacgagcaatcctgcaacggtacctgcagcacctgcagctaattcgttcataggtacttttgccaatgaatcaattccactatgcagcctgtctgccatcaatgttccaccaatattacatacagccataaacattacagctcccagcagagtcgatataccagctcccagtaatcctgctgactgaatccactccgccatccatgggaccgattttcctgccagatgatatgccgtgtagccgaaccatgcaccgcacaatcctgtaaaagttaaaatgccttttttccacattagtccctgcacctccttcaatgtatcttgatctttatatccagtatgatccaattcctgaattgctaatcccatccgcaagaactttttggaaatgttgcaatcgtcagttgaaagtaggtaaattattggcatataatgaattcaattcatatcccgaggtgagtggcaaaatgagtacgctaagtttacaggctttccaggatcaagtttctgaactgttgttgcgtcatcgcagcctgattgatgtactgtccaaaacgggacaagccggagcgtctgttaaccgtgccgtgtccaaagccattaccgaatgcggctgcatcgagctgcacgccaccaagcagaaatatgccccggagagcgatatcgctcaaaccaagggcctgctggaaacgcatgtggaaggtgagttgtgtgagaactgcagagaggtcatcagctctgaactagggcggaacctgttctacatgtcggctctctgcaacctgctggacattaacatggaagaggtcgtaaatcacgaatcacagaagtgttcaacgttagggatgtttaatctgtcgtaagaagatatgtatgtcgtccgtaagggtttcttttaccgtaaatagatctgaataaacaaaaagcacgcattctccagttcaggagagtacgtgctttctttgtatagtgtctgtccccaaggcgacttaacgatcggaaggacgggaagatttctcatccttgcgctttttcgcccgactacgtgaggccgccgttcgcacattatgcttcattccatacagggcgtataacaccagcggaataaagatcaatttggataactgctccgggaaaattacggcaacggctatggcaaatagcacaacccatggtgcaatccagattgccttgcgtggcaaaccgacctttttgaagttgggatatttaagcgaactcaccatcagatacgataacagcaatgtagcaatcatcatgctaaccgggccaatatccttattgaacaaggacagtgtggccagtaccccaccggctgccggaatcggcagacctgtgaaatacccggggattcccggacgaacattaaaccgagcaagacgaatggctccacagatcggaaaagccgctgttgcaatccaggcgaggatcggcatcgaatcttgaaatgacaccataaatatgatcagggctggtgctgcaccaaaggaaaccatgtcagacaaggaatccagttccttgccgaattcactttgggcattaagtgcacgtgccactcggccatccagaccatccagcagcatcgctacaatgaccataatggcagccaaactgtaatttccatcaatcgcaagcaaaattgccatcattccaagaaacagattacccagggtaaagagattcggaatgaatctggttagcatcgttgtttcacctcatccatttcaagcctttatataggcaaacccttacatctgtctgtcgataaacatttgctcctgcaaacgtttcaggccttccttaatggtccgggcacgaacttcaccaataccgtccacttcgtccagttcttcaattgtagccataataacatgaggcaattgttcgaattgatccaccaaattatggataatgacattgggcaggcgggggatcttatttaatacccggaatccacgaggggcaaccgaatcctcagaagtagccgctgatgatggatagccgagcagacggacaatatgatgtgcatccagcaactcatcgtccgacaatcttttcagtcccacgataatttcacggattttgtcatcactgtcgtcacgggcatagtctttatacaataaccaggcttcttcttccgttgtacccacgagttcttccatttgcatggaaatgagtcgtccctcattcccgagttcatgaatgtaccgtttgatttccgttttgatccgcatcaccatttcggtacgctgaatcacattaaccacttcaggaatcgttactaattcctcaaattccgaagcactcagatttgtaagggactgtgttaataccgctttgtatttctccagggtttgaatcgcttgattcgctttggtcaaaataaccccgatttccttgagggaataacgaagtgttccctgatacaaggtaatgatattccggcgctgtgatatggatacgaccaatttacccgtttgctttgctacacgctctgccgtccggtgacgaatccccgtctctgatgaagagatagatgaatccgggattaactgggtattggcgtaaagaatacgcttcaaatcttcgctaagaataatggcaccatccatcttggcgagttcgtacagatagtttggggagaaatcacagttaatcgagaatcccccatccaccacttccattacttcagggctgtatcctacaacaagcagtgcgcccgtcttggcgcgcagcacattttccagaccttcgcggaaaggtgtacctggtgcgatcagccttaacaactcattcatattatccagttggctcatatctttcatcttgttatgccccctaatctaaagcaaccgctagtgcatctgccacggtattcacaccgatcagttgtatcccgcgaggatgtttccagccctttaagcttttttctggtaaaatgactcgtttgaagcccagctttgcggcttccttcactcgttgttcggcccgtgatacggctcgaacctcacctgtcagaccaatctcgccaaagataacgtcatccggcttggtcggtacatctctcaaactggatgcaatgctgacggcaaccgccaaatctacagcgggctcatccaatcgtactccaccagccacgttcagatatgcatcctgggtctgtaagaacatacccattcgtttctccaacactgcaataatcagatttaatcgatgcagatctacccctgttgccatacggcggggagaaggaaaatgggtcgtcgagatcaacgcctgcaattccacaagcagagggcgtgtaccctccatactggcaactaccgttgaacctgctacccctagtggacgttccgacaaaaagagttcggacggattgcccacttcacgaagtccatcttcgcccatttcaaaaataccaatctcattggtggaaccaaaacgattcttcaccgcacgcagtaagcgataagtatgatgccgttctccttcaaaataaagcacgcaatccaccatatgttctaacatacgtggaccggcaatggcaccttctttggtaacatgccccacaagaaccgttgcaatgcctctgcctttggcaatccgcatgaaccttgacgtacattcccttacctgtgctacactacccggcgcactggtaacttcgggaagatataccgtctgaatggagtcgatgaccagaaaatgcggctggatctgatccaccgcttcctctacacgttccatattggtttcacacagtacatacaactcggcagagagtgccccgagacggtctgcccgcaatttggtttgcttgactgattcctcaccggaaacatataacacacgcaaacccgaatgcgtcaaagcatgggacgtctgcaacatcaacgttgatttcccaatacccggatctccgcccaccagaacgagtgaacccggaacgattccgccacccaatacccggttcaactctccgattccagtctgtacacgcggttcctgaccgctatctatatctatgataggaagcggtttatctttactgtcaaacagaggagaatttctcccttgtgttttgaccaccgtctctgtttcttccaccattgaattccatgactgacaacctggacacttaccgtaccacttgggggcttcatagccgcattccgtacattgaaacttggttttaactttggccacttcagcactcctataatttaattttataacagcattttgcattattcgacgaatttcacccaaactccctgacgtgcagggttactaaaagtttaccattgtttgagatttttcgtaaaggattatcgcaaactttacacatgttcctgacataatcatgtccgtcttctgtccaaagtgcaaaaaatcctccccggccgaagccgagaaggatttgattaaggattatggatcaatacaagctgaggtttaactccaaagcttgctaaatattatttagtttcgatttcctcattggacggaacgaccacgtcttttttcgtaacagacagtgcaccgttctcttcgtcgatgagcaatgaatcccctttggttacgttacctgtgagcaactcttcggacaatttgtcttcgatatgcttctggattgcccgacgaagcggacgcgcaccgtaagctggatcaaagcctgacttcgcaaggaaagacttggcattatcagtgagttcgaaatcgacctcatgttcgagcagtcgtttacgaagttcttcactcataagcgtaacaatttcagcgatgtgtttttcttcgagtgaatggaacacgataatttcatcaatccggttaaggaactctggacggaagcttttcttcagctcatccattactttccccttcatgttgtcataatctgctcctgcatctacaactgcagtgaagcccagtgtagagttacgtttgatcgcttcggcacccacgttggatgtcaagataatcagcgtattgcggaagtcaacgacgcgacctttggaatccgtcagtcggccatcctcaagcacttgtaacaagatattgaatacttctggatgtgctttctcgatttcatcgagcaagactacggaatatggtttgcgacgaactttctctgtcagctgaccaccttcttcgtacccaacatatcctggaggcgctccgacaagtcgggaagtcgagtgcttctcaccatactcggacatatcaatccggattactgcattttcatcgccgaacatcgcttcagccagagcacgagcaagttctgttttacctacccctgtagggccgaggaaaatgaatgaacccatcggacgttttggatctttaagtcccgcacgagcacgacgaaccgcacggctgacagacttcactgcctcatcctgaccgatgacacgttcatgtagaatagactccagattcatcagacgctgtgtctcttcttctttcagttggttcacagggattcctgtccagctggctaccacttgtgcgatatcctcaggagtaacctcggaatcggtgcgaccttgtttctctttccactggttcttcgttacatccagctcttcacggattttttgttccgtatcacgcagagctgctgctttttcgaactcctgactttgaactgcagcgtctttttccttacggatatcttccagacggctttccagttgtttcaggtttggtgggatcgtgtaagagttcaatcttactttggaacccgcttcatcaatcaggtcaatcgctttatctggcaggaaacggtctgtaatgtaacggtcagacagtttaaccgcctgcacaattgcttcatccgtaattttcacgcggtgatgcgcctcataacggtcacgcaagccgtgcaagatttgaatcgcttcttctggagaaggctgatctacagtaatcggttggaaacgacgctcaagcgctgcatccttctcgatgtatttacgatactcatccagcgttgttgcaccaatgcactgcaattctccacgggccagagccggtttcaaaatgttagaagcatcgatggcaccttcagctccgcctgcgccaatcaaggtatgcaattcgtcgataaacaggacaatgttacctgcttggcgaatctcatccatgatttttttcagacgatcttcgaactcaccacgatatttggttccagcgactacagaacccatatccagggtcattacacgtttgtcgcgcaatgtttccgggatctcatttgcgatgattttttgtgcaaggccttcagcaatcgctgttttacctacacctggctcaccgatcaataccgggttgttcttcgtacgacggctgagcacctggatgacacgttcaatttctttactacgtccaatgaccgggtcaaggttattctctctggcgtatgccgtgaggtcacgtgccagactgtccagcgttggtgtgctgacattggcaggtgtgccattatggctggatacagcttcactgctgccaagcaattgcagcacttgttgacgtgctttgttcaggctaattcctaggttattgagcacacgtgctgcaacaccctcgccttcacgaatcaatccgagcaggatatgctctgtgcctacataagtgtggcccaatttacgagcttcatccatagacagttcaattacttttttcgcacgtggcgtatatgcaatgttggtaggttgctcttggccacggccaattagcgtttctacttcatcctgaattttttccaatccgagtcccaggccgatcagtgctttggctgcgatgccttcgccttcacgaatgaggccgagcaaaatatgctcagtaccgatgttattatgaccgagacggacagcttcttcctgcgcgagtgcgagcaccttttgggcccgttccgtaaatcttccaaacatcatatctcctgcacctccatggttttggataaaacgagggtcatataatgaaataaccgtcgtattcttcatatcatttttgtttgcagccatgctgcgaataaagtcattcggcatttgtacatgccttattatataaaagccgcaatgcggcatgaaaccataattcaatactatatcaggctaaattaggactgcttcgctgcattgatcgtatcacgaatcaactgagcacggtagatgtcacgctcatctgtgcgcatatcttccccgaatgttttctgcaaaaatcccggctgtgtcatcacattcaattcattcattaccgtgatggacagtccatccaacaatccgagatccacgccaaggcgtacatccgataagcgctgtgcagcttccttggaatcaacaatagctgcatgagacaatatgccataagaacgcatgacccgatccgtaatccgaagtctggagtcggtaattaaccgttctctcgccgtacgttcatgaccaatcatctgtaacacaacaccatgcaggttctcgatgacttcctgttcggtctgtcccaaagtaatctggttcgagatctggaacaggttacccatcgcctcgctaccttcaccgtatatccctcttaccgtcaatcccacctgggaaactgcggttagaatacggccaatctgttgtgtcatcaccagggcaggcaagtgcatcatgaccgatgctctgacacctgtacctacattggtagggcagctggttaagtatcctctgcgatcatcaaaagcataatccacgtgcgcttcaaaagcatcatctattgcggaagctttctcccaggcttctttcacctgaaaccccggatagaggcactggatacgaagatgatcctcttcattaatcataatactgacagactcatcctcactgagaataaccgcaccattcctggattcattcgcaagacttggactgatgagatgtttctccaccagcacccgtttgtcgagttcgtcaatatcgatcagatccaacgtatgaaaatccccaaaggcatgaacgtcatcgtattgaagtacttcgctcagcttattcagcacctcttccgattgctcattggaagccagcatcggaaacggaacatgctgaaggttgcgtgcaatccggacacggctgctaatgacaatttcggaatcagccgcatcactgcgcatccagtcgctgagcgccttctctgtaaagcgcagattaggcattacgcatccctcctactcatgacaaactttactcctgagctattcctttttcaagtcctctgatctggtcacggatctgggccgcctcttcaaattcctcttgtgcgatgctctcttggagctcacgcttcagatcagcaatttgccgtttcaccttgatgcgaccaccagctcgtgcaggcactttgcctacatgggacgtattaccatgaacccgcttgaacaaaggatctagacgactgtcaaaatatttataacatgaactgcagccgaaccggcctatcttactaaattgtgcgtacgtcataccacactcttcacattgaagagcttttgcaggtggtgttcctgccgatccacttttgccggctggatcaaaatcaagcaatccggacaacaagttgtgaatggaaaacccacctgctgttccagggatcatttcccctttttcacgggcacatgactcacaaatatggaattccgtcttctctccatttacgatcttcgtaaaatgaagtgtcgccggacgtttattgcattcttggcacagcatattgatgtacctcctttgaccccgatagttttcatttaccgagcaaagatattaacatcgccttcaacattctggcacgaatttgatcccggtaaggaagtttgaccaatataacctctctagatacagcagctcgcatcaacccggcttcccgcttgttcaagaagcgcgcttcttccaattgatagatcagaccttcggcagctgtctgcccgatctcttcaccaatactatggtgcaaatgattatgcagagctgattgggccggtaattcaatgcgctgtatgcgaacataaccaccaccgccgcgtttactctctaccaggtatcccttctcgagtgtaaaacgtgtgctgatgacataattgatctgggaaggtacacatgagaattgatctgccagatcattacgctgaatttcaaccattccttcgggactttcatgcaaaatactcttcagatatcgttcgataatatcagagatattacgcatccaatcatcctccactgtctgaaacgttaagtcaataaggacccacacgcccccacagagtacaccttctctacccatttaaccaatcagggaaacagcgaatcttgcttccacaggtggtcaacaagagagcgaaggaagcacgaaggtcctttaatattcccttgatcctccgatgaaatgaatcccgtatattggcgatcatgcatcagattgtagaaagaaagctacttaagtattaaacctttagttgactttgactttctttgactttataaccattatagcatattttgtggttttgccaagtggggtcactattcattttttacgattttacacgaaatattccccggacacaaaaaaacctccccaaaatttctggagaagtccatttgtctttcaatcacgccgtatttctatataagctaatcaagttaaatggagcagtgggaatagtcatcagaagaaatcgagcaaataggtttcccgttcaggaatcgcttgttccaaagccttgattgctgtgttcggtccgtgaattcttccgattcgtgccatttccgttggtctgcgatatcccatcaggaccgcggtaagggattgaatatccaccttaatgatctgatcatcagtaattggctccgatgttttccatatggacgctgttccgttcattgccacgtttaattgccataccccttcattccatggagcgtgggcatcctctacctgaagtacaatctgcaccggtgagtcctggcttgcaaatggatactgggatataaactgctctacactaacgatacgcgccataaaataaggtacaatctcctgctgaatccgtgggttatccaattggaaggcaagcgtatcactggcaggcgcctgcaacgtaacttcctggatcatggaatcatggttagcaataaaggtccacagcccttgcctagcctcttcattcagatagatgatctctttaatggtaaatttattttccttaacctcatataaaagataaccttgtgctgcatcagcttcatcgtaatatacagccttttggctggtcccattaacaagaactgaattctcccaccttgcatcatcccgaaccagagttccgttataacgctcagcataagcactgtatacttcctttaatatgctgaggcctggatccccacgtcgaatcgttccaggtgtcgcttttttcagaggcaaatgagctgtaggtactttataacgtttaaattcaacatacgtctcccatccatacttccgatagaaaccaaaagagaatggatgcaagaatgatatgctctgtttgttacgattcatttcttccaacgcatgcttcagcagacccgctacccagcctttgcgtctatactctggccaggtggcaacacccgcaataccgcccatctcgaacgatctgccatgaatataggtttgaaaaggaatgatgtgaagtttggctcctagctgcccgtcctcatatacaccccatatatcctgtgacgaaaattgactccgccgtttttctttctgttcttcactcattactacttgaaaagcatattcggagagtgccatcgccggttcaaaatcatctaccgtcaatttctgaatttccatgttgtcctacaccccattcgctagagttatatcaatccaaatcatggcctgatatctgatatatgtaccccttagagtgtgtcagaggattcttacaaagtcaaataagagatgctttcgcatcccctaaaataaacaaataaaaaccaccaccgaataacatcggcagtggttcttc

SEQ ID NO: 19 - DNA, 51165 bp, Paenibacillus xylanexedens
  source 1..51165: mol_type = genomic DNA
tgcgcccttagctcagctggatagagcgtttgactacgaatcaaaaggccgggagttcgaatctctcagggcgcgccattatttttttagtatcgggatgtagctcagcttggtagagcacctggtttgggaccagggggtcgcatgttcaaatcgtgtcatcccgattttttgtttatgcgggtgtagttcaatggtagaactttagccttccaagctaatagcgtgggttcgattcccatcacccgcttacaggatataaaaaaaagagcctttgcatctgcaaaggctctttttttatattaacgtaagagttagcagttattttatataatattttatgtaaggaacagtacaggtttatttaaaaaaagagccaagacctccctatttcgatagtaaaggggtcttggctcttctgtttatctctgtggatgagctgcctctaagacgcagcagctattgtatagtgaagagcgcacaatttaacgttcgttatggtccgttactcttttacgcatgccagctaatccaagcagtcccaacaaaccaagccagccccaatccatgccgttgtcacggtcggttgttgtggcgtttgcccgaacattgttggtacgatagtcaccattgttgcggtagtttccatccatgttcatattcatgttggaattagtgtttgtgcggtccatgtagttggtgtcctgataagaccggacacgtgagccggttgtatccattcctttggacatatgaccatcagcagcagcagggccagccatcgcggccaccagaagcacggaagcaataattgttgtacctttcttcatcatgtggattcctcctttttagtaagagctacagattaatctgcccaagaagacaagtacaatatgtagaaatagtctgttaagatatacctttgagtccaattgaataacaacatacataagaaacttgcctagtaagcagactgtagtgggaagaaaattataattacatctttaatttattgcgtcactgtggtaaagtatacaaaagcttgctttgccggtcatgtttctttgtatatcatctgttctcaaacaatgaaattatgcggtttaaccttaatatcaggtacatcggatcatatctaaaagaactgtatatttatgagtttttaagaataggtatgagacttttgatttatctaaagtacgtgaaaaaggtatcatgcgacagtatatgaccattaattgaagcagaacaagaaaatgaataaaaaagcgtgtttttgtgctgtaaatcggggataatccccattttttctagtagaaaaataaagattttcgtaccattttattgtatgatgttatgaaggtgtcaaatttacgtgtacgaatggaacgatcagatgggaggataagcatgactgaaactatggtaaccgccagcaaaagccaatccaacaacctgcttcggcgagacgtgcggttcctgggcaatatactcggagaagttcttgtccatcaaggcggcacggagcttctagatatcgttgagaagattcgggaaacgagcaaatcgttacgtgcagaatttctgccagaactctatgcagagttcaaaacgatgatccaggaattagactcggacaatcgtcaccaggttattcgggctttcgctatttattttcaattagttaatattgctgaacaaaaccatcggatccggcgtaaacgggattatgaacgttctgctggggacgctgtgcagccaggatcgattgagaaagcagtacaggatcttaaggaacgtggactgtctcatacagaggtggaagagattctcgacgatttgtcgttggaactcgttatgacagctcacccaaccgaagctatgcgccgggttattctggacatccataaacggatatccgaagatgtcatgtcacttgataatcctacgctgacgttgcgtgaacgtgaacagttgcgtgagaagctgctgaatgaggttattacactctggcagacagatgaacttcgcgaccgcaaaccgactgtactcgatgaagtgcggaacgggatgtattactttcatgaaacgttgttccacgtacttccggatgtatatcaggagctggaacgctgcctgaacaaattttatcctgaccatgactggcatgtgccgacgtatttgcggttcggttcctggatcggtggagaccgggatggaaatccttcggtaacttcagatgtaacatggcagacactgttgatgcaacgcaagcttgctttgcgtgaataccaacggattatgattgaacttatgggccatctcagcttcagcacaaacatcattcatgtatcggatgagctggtgcagtcgattgagcaggatcgtaattctgttacattgaaaaaagtggatatctggcggaatgaaaaagagccataccgcatcaaattggcttatatgattgccaagctgaacaatgtactggatgaaaacaaattaggtcagcctgaccgttatcatagcgcacaggatttgattgatgaactgatgattattgatcgaagtctgcgccatcattttgccgattacgtagcagatacgaccattcgcaaaatgattcgtcaagtcgagttgtttggtttccataccgcagcattggatgtgcgtcagcacagtaaggaacatgaaaatgcgatgtcggagattttggcgaaaatgaacattgtagaagattatgcgcgtctgactgaagacggtaaaatcgatctgcttgctcgtttgctggatgatccacgtccgcttacttctccttatcaccaatacacggagggaaccaaagagtgtctggaagtcttccgtaccatcaaacgtgcccagaacgaatttgggaacggctgtatcacaagttacctgatcagtatgacgcagggcgcaagtgatttgctggaggttatggtatttgccaaggaagtgggcttattcaccaaaggtcacaacggtgacgttgtatctacacttcaagcggtaccgctgtttgaaacgattgatgatctacatgcggcttcggacattatgcagaagctgttcaaccttcctgtataccgcgcaagcgtaaaaggacggaatgaactgcatgaaatcatgcttggttattcagacagtaacaaggatggcggcgtggttacagccaactgggaattgcgtgtagcaatgaatgccatcacggctgtaggtaatgaacacggcgttaagctgaagttcttccatggacgtggcggggctcttggacgtggcggcatgccactcaaccgcagtattcttgctcaaccaccacatacgattggtgggggcattaagattacggagcagggagaggttatttcttcccgttattcccttcaggggattgcataccgcagtctggagcaggcaacttcggctctaatcacagcagcacttaatgggcttgagccgcaagagtcagcatccgaacgtcattgggacagcatcatcaaagagatttcggaagtatctctgacgaaatatcaggatctgattttccgtgatccagacttcttcaccttcttcaaagaatcaacgccgcttccggaggttggtgagctgaatattggttctcgtccatccaagcgtaaaaatagcgataagtttgaagatctgagagcgatcccttgggtattcgcctggactcaaagtcgttatctgcttccggcatggtatgcggcaggaacaggattgcaaagttactatcaggataaagaggaaaatctggttgtcctgaaagaaatgtatgcaagcttcccattcttccgtacattaattgatacggtacagatggccgtagccaaggctgatttggtcattgccaaagaatattcagccatgacttcgaacaaggaagcccgtgatcgcatctacggtcagattgaagccgaattcaagctcacaaaagagctgattctgaaaattaccggagaagctgaaattctggatgatgtaccggttattcaagaatccatccgccttcgtaacccttatgtggatccgttatcctacatgcaggttcaacttctgagcgagctcagagatatgcgtgaacgtggtgaggatgatacggaactgcttagagaagtgttgctgacaatcaatggaatcgctgcaggacttcgtaatacaggttgattatcaatttgttgtgaatgatgattatatgtaacaaagtacccattactttgttaactaaaaagctctattctctgctctacggagtaagagatgaaacgggactcctgcgggagttcccgtttttactgtttttggcggatatttgtcatacagtcttgatttttgaccaaagttgatttacgatttgattggtgaattacaagtgtggacgggtatcagaagacggaagacccatcagcatgtctgggggaataagggtggacaatttggagaataggcttattaaactggtgctcaagggcgaccagagagcctttgcagaaatcgttgaactatataaggacaagctatttcatttggcataccggatgctgaacaatcgtcatgaagctgaagacgttgtgcaggagacgtttttgcgtgtgtttcgtaatatggagaagtacgatccgaaccagaagttctcaacctggatctaccggatcgcaacgaatctgtgtattgaccgactgcgcagaaagaaaccttcatactcattggatgctgaactgaatgatcaggaaggatctgatggttatgcgatgctcccgagtgatgatcgtacaccggagagtgaagcgctcctgtcagaaacgcagacactcattcgtgaggccattgacagtttgccagccaagtataagtccgttatgattctgagatatttacaggacttgtcgctacaggaaatcagtgatgtgacaggtatgcccgtaacaacgatcaagacacgcgttcatcggggccgtgattttctacgtaaaaaattggagtataagttataaatgttaagtgcctttaaatatgggcgaaattatttgaaacatatccgaaacggatgcgtatgtaatgtatgcaagtcttatgcgtgctttttaatggcacatggactaagtgatttaagaaaggattggctctcatatggattgcaactcggccgtctctttaatgcatgaatgtttggatgagtcgttgtccccggcccagaaggttgaactgaaaagtcaccttgtgatctgtccggattgtcgcatgcgctttaaagagttggaacagacggaaatgttactctttgccatgaaacactattcaccgtctgcctctgatgagctgaccaatcgaattatgaatgctctgccccagcccaagagacagcaagcatggctcaaatgggtcaaaggacatcccgcgctgacggcggcagccttctttttggtcgtgatgctctttagcgccttgaatttctggaatcagaataacgaaatggttgttaagggaaataatctggaccagatcgtgattcagggtaacacggttattgttcctgaaggtaagtcaattgctggcgatcttacgatagaaaatggaaccgcacaagtatatggtgatgtgaacggcaatctgacggttatcgacggacaactgtttcaggcttcaacggcgcatatttcaggtcaggtgaaaagtattgatcaggcgctggactggttctggtacaaaataaccaatatggtaaatgaagtggcttatcgctagaacagggtaaaattcttcaatggtatataccaagcagggtacctccagattgcagggggtactctttttttatacgcaaactttgtaattcatggtaaatgtgatgtttatgtgcagtttgagactgccgtaacttgcaacctgaacgttaacgttataacctagatactaaagagaacatactactacatatagataagcattttgcacaaatcaaataatgcaaaaatgcggagacaaaggattatataaaatcctaatgggttaatatgagatcagggtttactcatcaatggggatagcgggggctggcttatgaattattttgctgacttaacgtggacagagtccattaaggacgttatcgatatattgatcgttacctatattatgtacaaactgattttgcttgtgcgggggacacgtgcggttcagctcctaaaagggattctgttccttgtgctgatctgggcattaagtacgtggctaaacttgtatacgctcaaatggttaatgaaccagatgtttacgtttggtgtcgttgcggtcttcattatctttcagccggaactacgtcgtggtctggagcaattgggacgcggtaagctgtttggacgttcagcggcagcgagtgatgaagaactaaccgtgttaattggtgagattattaagtcagttaattatttgtcacggcgtaaaattggcgctttggtcgtatttgaacgtgaaacaggtctgaacgattacacggaatcgggcattaagatgcactctctggtcagctcggagctgatgattaacatctttattccaaatacaccgctccatgatggagccgttattatacagggaaaacagatttcggcggcagcttgttatttgccattatcagagaatccttttatcagtaaggaattgggaacacgtcaccgtgcagcaatcgggattaccgaagttgcagatgcgatctgtttggttgtctccgaggagactggacaagtgtcacttgcaatgaatggacaggtcgttcgtgatattaaggaagaatcgctgattgccaaactgtatgaggagttgcgccctacatccaatctgaaaaagaatggctggacaaccttctggaaacggaagggaggacgtaacaatggataagtggtttaacaataataactttgccaaaatacttgcgcttgcggtgagcctgttgctctggttcatgattcatctggatgaagtaccaaccacccctacgattacaacagggacaaccaacaaggttgtggaacgtacggtgcctgttcaaccttatggattagacagcaacagctatgtgctcacttcattaagtacggatgaggtccggctggagattaaaggacagcgctcgatgctaacatcgatttttacgaatgacgattacaaggtactggtcgatctgagtcaggtgaaagatgggtccaatacactgccacttgtacctgatttgccttccggggtagaagtggtcagcatggaaccttccatggttacggtgaacgtagaaaaattgggcaccaaatccttcaatgtgaatattgtacccgaaggggaaccatccgccggatacagcgctggaacgcccgtaactgaaccttcgacgccggttaaggtaactctgcccgaagggcaactcgaggctgtagcgaaggtccagggcagtgtgagcgtgaaagatgccaaggaagatgtcatacagaaaaaagtgaaacttcaagcatacgatgctgaaggcaaggtccttgaaaatgcgattataacgcctcaaacggttgaagtccgagttccggtcaatcagccctatacatctgtacccttaagaatcaaatattcgggacagcttccggaaggcctggtactctccacggtagagccaaacgtgaaagaagtctcggtttatggatcagaggatgcgcttgcaggtatacagtcctacgaccaagtaacccttgatcttacacagtttgatcagtcgggtacatcgacagttaacgtggacttgacgccgccttccggttttgagaaaatcgagcctagttcgattcagatcaaggtaaccatatcaccatttgacgaggcagaggagacaaccaaagtctttccgaacgtccccgtcacacttaccggtgcggggaatggactggaagggacgctggttacgcctcgaagcggcggtctgaacctcacacttacaggctcagcaagtatgcttgagggtctgagtagtgatgatctcacgttaaccggggatcttgctggacttgcggtcggaacgcatgagatcaagcttgaagccgacctgccccgttatgccaaactggatgaatcatccactgcattgagtgcgacggtcaaaattagcgaaaaggctgaagacaccacgaccactcctggcgaagaaccgacggacgagggaacggtagcacctgacccaataccagcagaggttgaaaatggggaaacagagcctgttcctgatgaagaagaaacggaatcgaatacggatactcaggatcagggccaacaggggagcacaagcagtcgaggtaatttaaataataataacagcggtactggcagtaaaagtggcgcgaatccgtaaacgttctaattttaaaattctcaaaaaaataataatagtgctcgtatatgatgcgaatagaaggagttaaatcatggggaaatattttggtacagacggtgtaagaggggttgccaataaagagttaacggcagagctggcttacagcattggacgttgtggtggttacgtgcttgcaggtggtgtggaaagaccaaaagtggttatcggcatggatactcgtatctcgggattgatgttggaatccgcactggttgcaggtctgttgtccattggcgctgatgtgatccgtctgggcgttgtatccactccgggagtggcgtatattgcacgtttgttgaaagctgacgcgggcgtgatgatctcggcttcccacaatccggttgaggataacggaatcaagttctttggtggagatggcttcaagctgtctgatgaaacagagaaccggattgaagaactgatggatgcggagacagatcaattgccacggccagttggtggcgggctgggtactgtaacgacagatgaagaatcccgttatcattatcttgatttcctgaaaacgactgtaaatgaatcgttctctggacttaaaattgttttggactgtgcaaacggagcagcttatgaactggcaccaaaattgttcagtgaactaggtgcagaagtcattgccattggcgctgagcctaacggcctgaatattaatgagcaatgtggatcaactcatccagagaacctgaaacaagaagtgctcaaacataaagcagatctgggtcttgcttttgacggggatgcagatcgtctgattgctattgatgagacaggcgctgaggtggatggagacttcattctgtgtatctgtggtgatgcgatgaatcgtgcaggcaagttgaaggacagtactgttgtatcgaccgttatgagtaacatcggattctacaaagcaacagagaaacttgcactgaaaacagctaaaacggcagtaggtgatcgttatgtgatggaggaaatgcgtcgcggcggttacaacttgggtggagaacaatctggccatgttattttcctggattacaatacaactggagacggtatgctgactgcgattcaactcgtggatacgctcaaggcttccggtaaaaaactgagtgaactaaaagcgctaatgacccagtacccacaagtattggtgaatgtgcgtgttgaagataagagcaaatacgagggtaatgctgcaatcgagcaagctattgctacagtagaacaacaactcggggataatggacgtgtactcgttcgtgcttcaggtactgaatctctgatccgtgttatggcggaaggaccagataaagacgaacttgaacaatttgtgtctcaaatcgcagatgtggtgcaaaaagagctggtataggactggaagatgtaagaggcttaatataacatgatttaggacttatgcatggatattcctgcgtcccgacctgatgagaccataggtctgtttatccggtcgggattgtaggtaaatatgctaaaattgtcacaggtactttgctccattgcaaaatggacctgacgtgcatataatgagtggagtcgtcattcagacacagaaagtgaggaacgtaaggttacagttatacaagcgccagagcttggagttgcgcgggatgatgttgatcaggatttcttctaggttgaagaacgctgattaagatcaacggcaatcaagctgacgaggtggaggtgttcggattgttcggcggggacctcccggtgaagcaccagagccgtaaaccggattgcggaaaatggataggtgactgtccacacaacgcgccggtgcaggtgcaagagttaaactaaaattcaaatgaatgtgcgtgaagagcgtaaacagtacgcggacgggaaaatgatgtacattcatgattgcattcattacagcttatgatgacagcggggcgacacgaggtcgctctgatcattgataattgaataagtaccaagtattcatgaaacgctaggcaatcactcatttttccgatatgccgcctctgcctgtttctcttcgtgacacagtattcatatacaaacggaggaaataaattatgtgcggtattgttggatatattggtaataagaacactcagtcggtattggttgaaggattgaagaaactcgagtatcgtggttatgattctgcaggtatcgcagtattcacaccggaaggtctgcaaatcacgaaagctcttggtcgtcttgcgaaccttgaagccaagctggatggtgcaccactggtaggtaatgccggaatcggacacacacgttgggcaactcatggtaaaccatcggatgagaactctcatccacacacagatggaagccagaaattctctgttgtgcataacggtattattgagaactacctggatctgaaggacgaattgatggctcaaggtcacacgttcacttccgagacagatactgaggttatctctcacctgatcgcacgtgaatacaatggtgatatcgtcaaaacagtacaaaaagtgatcacgttgttgcgtggcgcatttgcactgggtgtattgacagagcatgagcctgagaaactcgtagctgtgcgtcaagcaagcccattgattattggtattggtgaaggcgagaacttcattggttccgacatcccggcaattctggaacatacacgtaacgtgtacattctgaatgatggtgaaatggctgtattgacacatgatgctgtcgaattgatgacgattgaaggtaactttatttctcgggaaatgattcgtgtcgattgggatgctgtaaccgcagaaaaaggcggatttgagcacttcatgctgaaagaaattcatgagcaaccaaaagcatatcgtgatactatgctgggtcgcatcgataatgaaggcaaaaaagttcaacttcctgagttgaaaatgactgaagaacaaattaaaaatatccgtaacgttcaaatcattgcatgtggtacagcgtaccatgcaggcctggttggacgtacagtgattgagcaattggtacgtattccggttgaaacagatgtggcttccgagtaccgctaccgttccccaatcgtgcacaaagatacacttgtaatcgtagtgagccaatccggtgaaactgccgatacgcttgctgcattgcgtgaagcacaatccaatggtgcacatgtactggcaatcacaaacgtagtgggtagctccattgcacgtgatgcagatgatgttatcgcaacattggcaggtcctgaaattgcagtagcttctaccaaagcgtatacttcgcaattgatcgcgtttaacttgcttggtctgtaccttgcacaagttcgtggtactcaatctgcagaagagattgaacacacgctggcagcaatgcaagcattgcctgagcaagtggaatccatgttggagcaagcggaagcaatcaaaggatatgcagagcaaatctccaaacatgaacatctcttcttcattggccgtggtcttgactatgcagtagctcaagaaggatctttgaagctgaaagagatctcttatattcactccgaggcgtatgctgcgggtgagttgaaacatggtacgcttgcattgatcgaagatggtatccctgttattgccctggcaacgcaggagaacgtacttgagaaaacagtgagcaacattaaggaagtaaaagcacgtggtgcagatgtattggcaattacgtatgaagagcacgtagcaccattgctgaaatccgtggaccaagcgtttgcgattcctaagacgctgccactgcttagccctgctttgtctgtagttgcgctgcaattgctggcatactatgcttccctggcactgggtcatgatgtagataaaccacgtaacctggcgaaaagtgtaacggttgagtaaggtattctgtacaaattagtttattgtccaatgataaataagtgtagaaccattaacaaaagtatggaactacacgaactattgtccaatgatatggacaacgggttgatcaaaagattcagtaaactaatacagtataaacaaaataatggtcctgatgactctaagtcatcaggacttttttgatgtttcaggagggtggttctaaatattagaaccaccttatttgtgtttgtgcattgtaaattgcgatcattcattggatgaaaatccatcaaattatagagcaccttaggaagagtaccttttgtaattctcacatttgaaatattcttcgtgcacgaatgtaatcaactacttaaagagaatcattaacattcgcaattcgtaagtgcaaatatatcccaagaaggatgcggatcggtcataaaagatcatttgaatggtaaaggaagatgactgaacgtgacgggtacatctttcagcaactcacaaaatggtatgccaagaagcaacaatgcgctcgatgaagaagcttattacgcgaagtaaaattattgaccgttcaattcggactcagaacgcgattgtaatctgcatgtaaatgagtgaaggacatcggaaagcgtataagggaaaacctcacgtacggtttgacaaggaggaacagaatatatttcccctttactctaacagaggcgtagagaagaagacgtgatacaaaacgatgtcggctaccatccgtgcggacgctatggccagtttccagccaggctttcagaaattggtcaggtaatcaagttaaaaattacaaagtgcaaggaatcggaacaccgacaaagaatatttaaagggaatatgtaccaaatttacctgttaagtgactaaatgtcaacactcgtcgaattccttgattgatgtcaaatcatgcccaacgtttcttctccattcactatttttaacgaaaaatgttaacacataatgttttatgaaccaaatttaacaatataattactatatttaacaaaaatttcactatacattcttgtaaattttgatataattcaacctaggtcttattccctattattctaataaatggaattgtagggttttttatacccatccaagctgtgtgcgagagaccagtatactggcttaccaacaagccggcatgtggggaccaacaattgtggaaaatgacagcctagaatatgttgctccatgacgtcagaaggtttagaaaggaaggttcggaaagatagagccaaccttatcccaattccgatggaggatgaagcgagtgagcatttttgaaaagctggaatccaacgtaagatcttactgcagaagctttccggtggtattcgaccgggccaagggagaccttttatattctgaggacggaagagcatatattgatttctttgcaggtgccggggcactcaattacggccataacaacgattatattaaagaccgggttctcgattacttgacctccgaccggattatgcacggtctggatatgtatacaatggccaagcgtgaattcatccagagcttctccgagcggatcctggagccgaagaagctgaattacaagcttcaattctgcggtccaacagggacgaatgcggtggaagcggccctgaagctcgcacgcaaggcgaagaagagaagtggaatattcgcattcatgggtggcttccacggcatgtcgctcggcagtctgtcggcgacaagctccaagtccatgagagaaggggcggggcttcctctggacggagttacgttcatgccgcacccgagcggggctttcgctgaaatggatacgctcggttatatcgagaatatcctgactgattcgcactctggaatcgataagccggccgcgatcctgcttgaaacggtacaagccgaaggcggaattcacgttgtcgacgcacagtggctacgtgagctgcagcagctttgccgcaggcacgatattctgctcattacagacgagattcaagtaggatgcggccggacaggcgaattcttctccttcgaacgtgcggggatcgagccggatctcattaccctgtcgaagtcgatcagcgggtacggcctgccaatgtccctcctgctgctgaagcccgaactggatatctggacgccgggcgagcacaacggcaccttccgcggcaaccagctggcttttgtggccgcgaaggctgctctcgagttccgggacagaaccgaactggaagctcaggtgaagcagaaggaagaatatgtgcgctcgttccttgatcaagaaattaagcctctgcatccgtccatcgccatccgcggactcggcctgatctggggcattgacgtctcggggttcatggatgaagccggggcgaagcgggtgacggatatcagcttcgagaacgggctcatcattgaaagagccggcagaggagattgtgtgctgaagatcatgcctccgctgaccgtctcgatggagcatctggccgccggctgcgacattatcaagtccagtatgcagcaggtgatctctcagaagaccaaggatttactagtaacgacctaagcttggccaagccgatggtcgcccccggcaagaggcacgaaagtgccttccggagggcgtgcggacttgatgttaaggtagcgctttcacctcatgctacctgcggtaacgtcaatcagcatggaattctccggcaatccaagcgcagtcccgttcgtgccatacggagcattctttgagcctcatgcagtaccctcgttaaatttaatcgtcaggaaaagctcactaccccgcagccgaatctttacttatccacaccagggctgtgggggaataatcaaatcgtacatagagtgtatcaataccccttaaacataggcttcgtcaaaggcagctcgggtaccaaatcaggaggtacggtcgacttcctgctggacggccggaaccctgcggcaagccttacatcgacaggaggaacattccttgtcgtttatccccaaatccaattccgaaccccaagttaaaccaaatcccgtcttcgggtggctcgtccgcagcaatcttattgaagcagaggagtccgaagcagccgcatccttgcgtagaacgatgtttgttgtcctttacgcatgggagccgagctgtacagctgctaggcagaggattgccgcatgtgatcaaccgggcaatcgaagcgtgacgttgcgcaagccattgatattgttgtcagatgtttgaaaaagagaggagcgaggctggagcgttgcttcggcatatgctccgccggattgcttttaccgatgaagagaggggaacgatccagatggcttttgaaaaagaaacgttgttttggaacgaaaaattcggtagtgacgattataccttgacgcggttgccttacagcaaagctccaaactccctggtgcccaatgtgaaaaccgttggcggttcgctttcggaggaagcggcgcagcgggtccttcaaatgagcaagggtgctccgctggctgcttttatgattttgctcgccggtgttcaggcactcttgcataaatatacaggagcttcagacatcctggtcggcatgccggttgtgccgaaaaagggggagacgcgtcgatccgttaatcatacggtcattttgaaaaactcgctttcggtgggggcaacttttaaaacgcttctgagcgaattgagaacttctttgccggaagccattcagcatcaacatattccgttcttgaaaatgacggagaagctggatctgcaatatgcagaagggatacccttcgtccatacgctagtatcccttaaggagctgcatctggacgaaattgggcaaaacgtagtcacagactgttcgtttgaattcagtttagccggcgggacgatacagctagcgctgtcatataacgagcacttatatgactccgagttcatgaatcgggttgtcggccatctgaatcgcctgctgtccgtggggcttcatgagctggagctggacatcgtgcgagcggacatgctgtcggaggacgagaaatttcaattaatacaaagcttcaacgataccgagaaggactatcctcgtgatcggacgattcatcagcttgtggaggagcaagcgaagcgtgtgcccgaggcgactgcggttgtttttgaggggcagcggctttcatacgcagagttgaacgaacgggcaaaccagctggcgcgtacgctacgatcggtcggtgtgctgcccaatcagttggtaggcttgatggttaggagatcgctggagacggtcattggcattttggcggttctgaaagctggcggtgcctacgtgccgatcgacccggagtacccggaagaacgtattcgctacattctggagaactcgaacgcgcagctgctgctgactcaaagagagctgttacagcaagtcccgttcgaagggaccgtattggcgctagatgacaagcaggcctatagcgacgatggctcgaacctggaggcggccagtggtccacatgatcttgcctatgtcatttatacgtcaggtacaacgggcaaacccaaaggggtcatgctggagcatcgtggtttggtcagcttgaagttgatgttcgcagacaggctgggcattacggagcatgaccggatcgttcaatttgcgagcttgtccttcgacgcatcctgctgggaagttttcaaagcactctattttggcgcggctttgtacatcccgacggccgagacaattctcgacactcgtctgttcgagagttatatgaacgagcatgcaattacggcggcgattctgcccccgacgtacagcgctcatttgaacccggaccgtcttcccagcttaacaaagcttgtaacgggaggttcggcggtatcggccgaattcgtgcagcagtggaaagcgaaggttcactatttcaatgcttacgggcctaccgaagcttcgattgttacgacgctttgggatgcggatgagcagcagccggagcgtagagtcattccgattgggcgcccgctgtctaatcatcagatttttattttggatgcccacctgcaacttgtgcctccgggagtggacggcgagctgtgcgttgcaggcgtggggcttgcgagaggttacctgaaccagccggagctgacggcagagaaatttgtggaacatccgtttgcgccgggagaacgcctttaccggacaggagatctcgcccgctggctgccggacggtaatatggagtatttgggccggatcgaccatcaggtgaaaatccgtggattccgaatcgaggtcggtgagattgaagagcagcttctgaagatcgactcggtgcaggagacgattgtgattgcgcgggaaggcaaaagtgggcaagaactgtgcgcttacctggtcgctagtctccctcttacgctcggcgagctgagaagcgcgctggcgcaaaaattgccgaattacatgattccggcacattttgttcagcttccgcagatgccgctcaccccgaacgacaaaatcgaccgcaaggctttgcctgcaccggaaggaaacgcactgaccggcggcgagtacgtagctccacgcaatgaagccgagcggacacttgccgatgtgtggcaggcggtattgaacgccgatcgcgttggggtaacggatcatttcttcgagctgggcggagattcgatcaagtccattcaagtatcttcgcggcttcatcaagccgggtacaagctggaaattcgggatttgttcaaatatccgacgatctcacagcttagcctgcatgtgataccgatcggacgtaccattgatcaaggcgaaattacgggtgaaacggcgctgacgccgattcagcattggtttttcgagagctcctttgcggccccgcatcatttcaaccagtcggtgatgctgtaccggaaggaacgcttcgacgaagagatggtacgtcaggtgttgcaaaagctggccgagcatcatgacgccttacggatggtgttccgcaaaacggaacaagggtttagcgcacggaaccgcgcgattcaggaagacgagatgttcacgctggacgtgttcgacttcaaggatgcggagaatgccacgcagactgtggaagcgaaggcaacggacattcaagcgggcatcgatctggagaacgggcccctcatgaaggcgggactgttccagtgcgcggacggtgatcatttgctgctcggggttcatcatgccgtggtagatggcgtgtcttggcgcattttaatggaggatttcactctaggttacgagcagactggcaaaagcgaagaaattcgtttcccggcgaaaacagatgcgtaccgtacttggtccgagcagttggctgcttacgcgcaaagcccggagatggcgaaggaacgggcctattggcaggccgtggatcaaatggaggttccggccgtgcccaaggatacggaggcggacgttacgacgcagcaggacagcgaatcgctgtttgtccgtttggctcccgaagaaacggagctgctactgaagcgggttcaccgtgccttcaacaccgaaatgaatgatattttggtaacggcgcttggcatagccttacgcaaatggacggggcacgaacgggtgcggatcaatctcgaaggacacggacgtgaatcgatcggaacggatatcgacatcacgcgtacagttggctggtttacgaccaagtttccggtcgtcctggagccggaaaccgaccgggatttgacctatcagattaaacaggtcaaggaaaacttgcgccgcattccgaacaaggggcttgggtacggcatatgccgctatctttcgaaatcggaggatggcttggtttggggcgcagagccggaaattaattttaactacctcggccagttcgacgatgatgtcaaccagggcgagatcggcatatcttcttattcgagtggcagcccggctagcgaccggcaggcgcgcagctttgtgctggatatcaacggtatggtgctggacggtgctttatcgctcgatctcagctacagccggaagcagtatcgcaaggaaacgatggaagccttcgctcagcggcttgagcaaagtctccgagagctcattacccactgcgcaggcaaagagaacaccgaattgacgccaagcgacgtgcaatttaaaggcttgaccatcacagaattggagcaaatcgcccagcgctcgagcaatctcggggaaatcgaaaatatttactcgctgacgccgatgcagaagggtatgtggttccacagcgcgcttgaccagcaaacggcagcttactttgagcagacgcggtttacgatgcggggagcgctcgacgtccagctttttgagaggagctggatggagcttgcaaaacgtcatctggtgctgcgggcgaattttgtgaatggaccagcgggcgagccgctgcaaatcatataccgcgataagccagtcggctttgaatatgaagagctgcttcatttgcaggtacacgagaaacaagcttacttggatgaaaaggccgaggaggacaagcttcgtggcttcgacatggaacatgatgcgctcgttcggtttacgattctgcgcaccgaagagcaaagttatcacgttctgtggagtttccagcatattttaatggacggctggtgcctggctcaactgacgcaggagttgtttgagatatactcggccctgacctctgggaagcagccagcgggaggtaaaggatcggattatggcgattatatcgaatggttggagaaacaggacgatcaggcggcatccggctattggacagcgttcctggcaggctacgaagggcaaaccgtacttccggggcaaaaggaaccagcgccgagcggcagatttacggctgatcacgtcaccgccgaactaggcaaggacttgagcaaacggatggaccgggtggcgaaacagcacctggttacagtcaatacgctgttgcaagccgtttggggcgtgatgctgcaaaaatataacggaacaaacgatgccgtattcggtagtgtcgttgccggaagaccggcggaaatcccgggcattgagtctatgatcgggctgttcatcaatacggtgccggtccgcgtcaatagcgaagtggacaccgtgttcgccgacctgatggcgaagctccaagagcgggcgctggattccgggcgttatgattactatccgctgtatgaaattcaagctcgtagcgtgcaaaagcagaatctgatcaaccatatcatcgctttcgagaactatccggtggacgagcagatggagcaggcgggggaccagcagcacggcggcctgacaattgctgacgttcagatggaggagcagacgaactataacttcaacgtgactgtggtgccgggagccgagatcgaaattcgattcgactttaacgccgaagtgttcgatgaagacagcatcgagcggctcaaggggcatctcgtgcatctgctggagcaggtaacggaaaacccggaaattaccgtgggcgagctggaacttgtgaccgaggcagaaaaggccgaacttctcggacgttttaacgacaccacgacggaatttccgcgcgggaagacactcattcaattgttcgaagagcaggcggagtacatcccggatgcagccgccatttcctttaatgagcaagagatgacttaccgcgagctgaacgaacgtgtcaaccgccttgcccgtaccttgcgcagccacgggatatcccaaggacgtctggtcgccattatggctgagcgttccattgaaatggttataggtatactggcagcacacaaagccggagccgcttacgtaccgattgacccggaatatccagaggagcgtatccgtttcttgatagaggattcaggagcgcaggtcatgctgacacaaagccgcttgcgcgagcgactggcgggtttggactcggtgatcttactggatgaagagtccttctatcacgaggacggaacaaacctaaatccagggattgaagcgacagatctggcctgcgtgatctatacgtcaggcacgacgggcaagccgaaaggaaaccttgtttcgcaccgcaacatcgtgcgcgttgtgcaaaatacaaattatatcgacatcaccaatcgcgatcatgtcctccagctttcgagctattcgttcgacggagcgattttcgatatttttggtgctttgaccaacggggcgcggctggtgctggttccccgcgagacgttgctggaaattggtctactggcggatctcatccagcgccagcgcatatcggtcatgtttattacgactgctttcttcaacgtgcttgtagatgtgaatgtcaattgttttcgggatgtccgggcgattttgtttggaggagagcgtgtctcggttggtcatgtacgtaaagcactcgcccatcttggagcgggtaggcttaaccatgtgtacggaccgacggaaagcacgatatttaccacgtaccttccggtcgacttcgttgatgagtcggcgcttaccgttcctatcggacgaccaatcagcaatacgacggtgtatatcgtcgacagccggaataagctgctgccgatcggcgtggtcggggagctatgtgtcggcggagaaggtttggtacggggctacaataaccggccggaactgacggcggagaaatttgtgcacaatccttttacgtcaggagagcgcatgtaccggacgggggatttggcgaaatggctaccggacggcacgattgaatatgtgggacgaacggacgaccaagtgaaaatccgtggcttccgcatagagctgggcgagatcgaaactcagcttcagaaagtggagggaattcggaaaacgacagtatttgcgcgggaaaacgtgtccggcgaaaagcagctttgcgcctattatgaagcggactgtgagcttccggcggccgagctgaagagcgtgctgtctcaggaactgccggcctatatgatcccgacgtacctgatccagttggagcgtctcccgctgacgacgaatggcaaggttgaccgccgctccctcccggcacctgaggagagcttgcaaccgggcgaaggacatactccgcctcggactccgctcgaagccagcttggctgaaatatggaaaagcgtgcttggattggagcgcatcggggttcatgacaacttctttgacttgggcggccattccctgcgggcaacgacactggtgagcaaggtgcatcaggagttgaacgtcgagttgcctctgcgcgacgtattccgctactcaacgatcgaacagatggctctcgccctctcccggatcgaagaacattcgttctcgtcgattccgctggtaggcgcaagagcgtattatccactttcctcagctcagaagcggctgtttatcctgaatcagctggaaggagccgagcagagctataacatgccgggtgtgctgctgctcgaaggatcaattgaccatagcctgctggagaaagctttccgcggactgatccaacgtcatgaaacgttgcgaaccggatttgaggtcgtacaaggcgaagcggtacagcgtatttacgagagcgttgatttttccgtcgtgtgtcgacatgcgaacgaggaagaagcgtctgcagtcgtgcaggcttttatccgacctttcgacttggcgaagccaccgttgctgcgtgccgagctcgtagagctgggagccgatcgttatttactgatgtttgacatgcaccatatcatctccgacggggtttcgatggacgtgttcgttgaggaactcgttcgtctgtatggcggtgagtcattagagcctttgcacattcagtacaaggactatgcggtatggcagcaatcggacgagcaaaaagtgcaattgaaacgcgaggaggcttactggctggaccgttaccggggcgagttgccggttctggaaatgccaacggactatccgcgtcctgctatacagagctatgagggacatacgctgacgtccttcgtggacgaggcaacgaacgaaggcttgaaacagctggccactcaaagaggaacgacgctatatatggtgttgcttgccgcatataccgtgcttttgcataaatacacaggtcaggacgatttgatcgtcggcacgtcgattgcaggcagaacgcacggcgacatgcagcctttgatcggaatgttcgtcaacacgctggcgatccgcaattatccggcttcggagaagaccttcctgtcgtatttggaagaagtgaaagaaacgactttaggcgcgtacgagcatcagaattatccgttcgaagaactcgtcgataaagtacaggttagccgggatttgagccgcaacccgctgtttgacacgatgttctccctgcaaaacctggaggagtcagagtttgagttggaagggctgaaattgtccccgtaccctagcgaatatggtatggccaagttcgacctgagtgtggatgttactgaagaaaatggcggactggagtgcaactttgaattcgcaacggctctttataaagaaagcacgatccggcggctgtcgattcattttggacatttgcttgcggcgatcgtgagccgtccagatgcaaagattgccgagctgggcttgctgacggcagatgaaaaagagcaaattctcggcgcgttccacccgacgcaatcggaagtggctcctgtggccgcgttccaccgactgttcgaggaacaggcggagcgcactccggaagcggaagccgttgtctacgagaacgatcggctgacgtatgcggagctgaacgtacgggcgaacggcttagcggccaccctgcgcgcaagtggaatcggccgggaggagattgttggcattctcgccgagcgctcggtggacctgctggtggccgtgctggccgtctggaaagcaggcggggcatatgtaccgcttgacccggattatccggcggaccgcgtgcggtttatgcttgaagacagcggagcgaaggtgctgctgacacaaacactgctgagagagcgtgctgaagcttggctcagcgaagaggaacgggcacttgcaaaggtgttgtacctcgacgacgaaacgtcatacagcgaagaacgggagaatgcaccgcttggctccagcatggtttccggtaaagtctccggcgagctgacgggtgctgtgaacagcgatgatccgagtcatctgaaggttgctggcttggacagcttccatgaagctcgtcctgaggacctagcgtacgtgatctacacgtcggggacaacaggcaagccgaagggtgtaatgattgagcaccgcagcttggtgaacacggcagcgggctaccggcgggaataccggttggatcagttcccagtccggctactgcaactcgccagcttctcgtttgacgtgttcgtgggtgatatcgcacgcacgttgtataacggaggcacgatggtgattgtaccgaaagacgaccgtctcgatccgtctcgtctgcaccactggatagagagggagcaagtgacgatctttgaatcaacaccggcactgatcgtaccgtttatggaatacgtacacgagcaagggctggagttgagcgggatggagctgttgatcacaagctcggacagttgcagtgtggcggattaccaaaccttacaggaacggttcggctcgtcgttccggatcatcaacgcctacggcgtgacggaagcggcgatcgactccagtttctatgaggaggagttggcgaagctgccgcagacaggccatgttccgattggcaaagcgtggttgaatgcgaagttttacatcgtggatgcacatctgaaccctgttccagtcggcgtgctaggcgaattggttatcggcggagttggggtagcacgtgggtacttgaaccgtccagagctgacggaagagaagtttgtagacagtcctttcaccgctggtgagcggttgtatcgcacgggagacttggcgcggtggatggaagacggcaacgtggacttcatcggccggatcgacaaccaggcaaaaatccggggctaccggatcgagacgggggagatcgagtcgcagctgttgcgagtggaaggtgtgcgcgaagcggtggtgctggttcgaagtgatgcgaacggtcagaaggcgctgtgtgcgtattacacgccggataccggtgcgaagctgttggtgaacgatctgcgcagtgcgctggcacaggagttgccgggttacatgatcccgtcgtacttcgtggagctggagcgtctacctctgacaccgaacggaaagatagaccggaaggtgctgccagcgccggaaggggaagcgggaagcggaacggagtacgtcgcaccgcgcaatgagctggaaacgaagctggcggcgatttggcaggaggtgctggggcttgcgaaggagattggtgttcacgacaacttcttcgacatcggtggccactccctgcgcgcgacaacgttggtcagtaagattcataaagggttgaacgtggatctgccactgcgcgacgtgttccgccattccacgatcgagagcatggctaccgccatttctcggctggatcagcagatatttgtttccattccggtgacggatggccgagaggtgtacccgcaatcttttgctcaaaaacgtctctttattctgaatcagctggaagttgcggagcttagctacaacatgcctgaagcgatactgctggagggtactttggaccgggcaaggttcgaagaaacgttccgtaagctcgtggcgcggcatgaaatgttgcgcaccgggtttgaaatggtggatggagaagcatcacagcgggtctaccaggacgtgaattttgcggtggagttctatcaagcggatgagcaagaggtcgaagcggtggttcacggtttcgtccgtccgtttgacttggctaagccaccgctgttgagggtaggccttgttgagctggctccggaacgccatattctgatgtacgacatgcatcatattatttctgacggcgtttcaatggaaatctttgttgaagaattcgtgcgtttgtatggtggagagcaattggagccgctgcgcattcagtacaaagactacaccgtttggcagcattcgcaggagcagcaggaacggcttcagcatcagggggcgtattggctggacatgttccagggcgagcttccggtgctggaaatgccgaccgactatccacgtccggctgtacagagctacgaaggtcaaacgctggagttttccttcgacgtttcaaaaaccggcggcctgaaacagctggcttcggaaacgggcacgacgctgtttatggtgctgcttgcggcgtataacgtgcttttgcataaatattcaggtcaggaagacgtaatcgttggtacgccgattgccggaaggaatcatggagatgtgcagccgttgatcgggattttcctaaacacgctggcgattcgcagttatccgtcttcggagaaaacattcctgtcatatctgaacgaagtcaaagaaacaactctgcgtgcctttgagcatcagaactatccgtttgaacaattggtggacaaggtgcaagtcacccgtgatttaagccgcaatccgctcttcgacacgatgtttacgatgcagaatacggagaacgagcaatttgagcttgaagggcttcgcctgattccttatccgagcgtacttgatactgcgaagtttgatatcagcttggatgtgggcgaggagaacggcggcttggattacagctttgaatatgcgacagctctttacaaaagggagacgattgaacggctggcaaaacattacgagcagttgctcctgacaattgtaaaccgtccagatgcgaagattgccgagctgaacttgctgacagcagaggaaaaagaacaagttctcagtgcgtttaatccagcgcagctagaagcggctcctgcggctacgttccaccgtctgtttgagaaacaggcagagtgtacgccggaagcggaggccgttgtgtatgaaaataaacgcctaacgtatgtggagctgaacgagcgagcgaaccgcttagcgctcacgctgcgtgcaaatggcatcggccgggagtcaatcgttggcattctcgccgagcgttcggtggacttgctggtggccgtgctggccgtctggaaagccggcggggcgtatgtccccctcgacccagattatccggcggaccgcgtgcggtttatgctcgaagacagcggagcgaaggtactgctgacacaaacgccgctgcgagaacgtgccgaggcctggctcagcgaagaggagctggcgctgatgtcggtgctgtacctcgacgacgaagtgtcgtacagcgaagatcgggcaaatgctccgatgtgctttgatcaaggctccaacatggcttccagtcgggtctctggcaaactaacgggtgctgtgaacggtgcggatcggaaccatctggatgttgtggatgatgttgatgttgatgttgttggcatggatagcttccatgaagcccgcccagaggatctggcgtacgtgatctacacatcgggaacgacgggcaagccaaaaggcgtgatgatcgagcatcgcagcctagtgaacacggcagcgggctaccgacgggaataccggttggatcagttcccggtgcgactgctgcaactcgcaagcttctcgtttgatgttttcgtgggcgatatcgcacgtacgttgtataacggaggcaccatggtcattgtaccgaaggacgaccgaattgatccgtctcgtctgcaccactggatagagcaggagcaagtgacgatctttgaatcaacaccggcactgatcgtgccgtttatggaatacgtgcacgagcaggggctggagatgagcgggatggagctgttgatcacaagctcggacagctgcagtgtagcggattaccgtaccttgcaggagcggtttggctcgtcgttccgcattattaatgcctacggtgtgacggaagcggcaattgactccagtttctatgacgaggagttggcgaaactgccgcagacaggccatgtcccgattggcaaaccgtggttgaatgcgaagttttacatcgtggatgcacatctgaacccggtgccagtcggcgtgctgggcgaattggttatcggcggagtcggtgtggcgcttgggtacttgaaccgcccagagctgacggaagagaagtttgtagacagccctttcaccgcgggcgagcggttgtaccgcacgggagatttggcgcggtggatggaggacggcaacgtggacttcatcggccggatcgacaaccaggcgaaaattcggggctaccggattgagacgggagagatcgagtcgcagctattgcgtgtggaaggtgtgcgcgaagcggtggtgctggttcgaagtgatgcgaatgggcagaaggtgctgtgtgcgtattacacgccggatactggagcgaagctggcagtgaacgatctgcgcagtgccctggcacaggagctgccgggttacatgatcccgtcgtacttcgtggagctggagcgtctgcctctgacaccgaacgggaaaatagaccggagggcgctgccagcgccggaaggggaagcgggaagtggaacggagtatgtcgcaccgcgcaatgagctggaaatgaagctggcggtgatttggcaggaggtgctggggcttacgaagcagattggcgtttacgacaacttcttcgacattggcggccactccctgcgagcgacgtcactggcaggcaaggtatttaaggaactaaacgtcaacctcccgctgcgcgacgtattccgccactcgacgattgcggcgatggccgaggcgattgcccggatggaacggcgggagcatgaggccattcctcaagcggagcagagagagtattaccctctgtcctccgcgcagaaacggctgttcattcagcacacgctggatggagcagatcagctttacaacatgccggaactggtgcaggtggaaggtgagtttgatttagacaggttggaagccgccttgcggaaattgataacacggcatgaatcgctgcgcaccggttttgaaatgatgaagggcgaagtggttcagcggatatacccacaggtcgattttgctatcgagcaccatcaagcggatacagaggattcagatcaaatcgagcagatcgtccgcaacttcgttcgtccgtttgatctcggccaaccgccgctgctgcgcaccggggtcatcgagctggagccgcacctgcgtattctccttttcgatatgcaccatatcgtgtccgacggtgtatcgatggcgattgtgatggaggagttctcgagtttctacgccggagaacagctgccacccctgcgcattcattacaaggattatgccgtttggcagcagtcgaaggcccaccgagagcgaatcgggcggcaggaagcgtactggctgcaaaccttcgaaggcgagctgcccacagcggacctgccgatggactacgaacggtctgccgttcgtagctacgaaggcgcgcatgtggagttcgacgtcgaagcttctctctctgcgcagttacgcgaattggctgccgagtgtgaaagcacactgttcatggtgctgcttgcggcctatactgtgttgctgtccaagtacagcggtcaggaggacttgatcgtgggcaccccggtggctggaagaactaacgccgatttggagcgggtcatcggcatgtttgttaatacgctggcgctccgtaatcgtccgtctggcgacaaaacgttcttgtcctacctggaagaagtgaaggaaacggctttgggtgcttttgagaaccaggattatccattcgaggatctcgtggagcgtttgaatgtgaagcgggagacgggccgcttcccgttgttcgatgccgttttcgacttgcaaaatatcgaagaacgagacgccgaactggaaggggtcagcctgaagaattacgagcttgaccatttggaggaagcgaagtttgatctgacgctgtttatgtatgaaaacgaaggggcattgagcgggggcttcttctacgccaccaagctgttcaaagaaacgatgatccgcaccttgactgaggattacctacgggtactgtctcaaattgtggaaaatccacaacttgagctaagccggattgaatgtcataaaccggcggcaggcgcaaagagtgccgtcgatacgatcgaattcgcgttctaataatacaagcgcgctccgccgtcaaccgaaagtggtgcgcatccaagaaagacggcgaacaacttgcaagtccgtaaatcaagcccgtaaacgcgcaggtcgtaagcaagcctttccagacctgcgtcggggtatgcggtcacttcatttttagaggaggtacgaatgaaatctttatttgaaaaggaagaacggtactggagcggcaagtttgacgcagatgatagcctgagcttccttccatacagtcaatcctccaaattattcgagggcggggaatctgcggcagagccggacttgcttcaccgtactctgccgagcgaactctcggagagaatcattggcctcgccagcggttcggatttggctctgtacatgattgttttggcaggagtcaaaagcctgctgttcaaatataccgggcgggaccaagtgcttgtcggcatgccttcgtatagcgcagaccagggcgagacgccgccgcatgacatcttggtgatcaagacatcggtaagcagccagactacgctgaaaacgctgcttgggggcatcaaaggctccatcggcgaggcgctggagcatcagcacctgccttttcgaaaaatggtggagccgctccatctggactatacggggcatggcctcccggtcgtcaacaccatcgcatccttcgccccgattcatccgggaccgctgggtaaccgtgtggcggctgataccgtttttcgcttcgaccgccaaaaccactccatcgagctggaaataagctttgacggacagcggtacgagcgggcatttatggagcaggcggccgaccatcttgttcgtttgctgtccatgcttttatttcagccagatctggagtttggacaagtcgatatgctgttcccagtcgagagggagatgctgctcaagggatttaatgacaccgaaaccgagttcgagcgggggaaaacgattcatggcttgttcgaagaacaggcggagcatcgcccggataacgtggccgtcgtcatgaacgagcggcaattgacctaccgcgagctgaacgagcgatccaaccgccttgcgcggaagctgcgggaaaaaggagtagaagcagaccagctggtagcgattctggtcgaacgctcgcttgatatggtcgtcggcattctggcaattctcaaagcgggcggagccttcgtgcctgtcgatcccgactacccggaggagcgcatccgcttcattatcgaggattcaggcgcaccgttattgctgattcaaaaacatctgcacgagaagacaaactttgaaggaacgcgccttgaattagacgattttgtttggggcgatagcggggcggaatccactggtgtgctggatgcttcgaatctggagccggccagcggtccgaatgatctggcttatgtcatctatacatcaggtacgacgggcaaacccaaaggggtcatgctggagcatcgtggtttggtcagcttgaagctgatgttcgcggacaggctgagcatcacggagcatgaccggatcgttcaattcgccagcctgtcattcgacgcgtcctgctgggaagtgttcaaagcgctctattttggcgcgactttgtacatcccgacggccgagacgattctcgataaccgcctgttcgagagttatatgaacgagcatgcgattacggcggcgattttgcctccgacgtacagcgcatatttgaacccggaccgccttcccagcttaacgaagcttgtaacgggaggttcggcggtatcggccgaatttgtgcagcagtggaaggagaaggtccactatttcaatgcttacgggcctaccgaagcttcgattgttacgacgctttgggatgcggttgagcagcagccggagcgcagagttattccgatcgggcgcccgctgtccaatcaccggattttcattttggatgcccacctgcagcttgtgcctcctggagtggacggagagctgtgcgtggcaggcgtggggcttgcgagaggttacctgaaccaaccggagctgacggcagagaagtttgtggaacatccgtttgcgccgggagaacgcctttaccggacgggagatctcgcccgctggctgtcggacggcaacatcgaataccgggggcggatcgatcatcaggtgaaaatccgcggctaccggatcgaaatcggcgagattgaagagcagctgctgaagatcgccgccatgcaagaaacggtggtgctcgcccgcgacgacgcaaacggccataagcagcttgttgcttattacgttgcggaaacgaggctggcggcgcatgaactcaaggagcagctcgccaagcagcttccgagatatatgattccttcgtacctcgtgcagctttcgcggatgccgctgaccccgaacgggaaaatcgaccgcaaagcgctacccgcgccagaggaagccgccactggaggaacggaatatgtcgcgccgagaacgctgctcgaaatgaagatcgcccgtgtctggcaggatacacttggcatttcacaggttggcgtaaaggataacttttttgagctgggaggcaattccttaagtctgattaggctcgttcaagccgtttacgatgaaacgggcatcgagataccgctgaatcgccaattccatcatgtaaccgttgaagccatggcttttggagaggaggatctggataaagggggagactccttcattaagctaaataaaacaggggatctgaacgtgttctgcttccctccaggcagcggattcggcatcggttaccgagagcttgcaagcagactagacggccgattcgtgctttacggcattgattttatcgacgatgtcatcgattacgaggccatgctgaaccgttatgtggatgagattgttcgtatccagcctgaaggaccttacgtgttgctcggttactgcttcggaggcaacctgacgttcgaggtagccaaatcgatggaaagaagagggtactccgtaacggacatgctcatggtggactcgtggattaaggacacactcacaccttatgaaacgtctgagaaagagcttgaagagatgcttgcggatttcgacgaagaagagaaggaattaatgagcaatccgctcgtgcgggagcgtgttcatcggaagatcaaagccacattgacgtacgaagcgcagcttattaattcaggaacgataactgcccggatttacgaactgattgcgaaggacagtgaagcgttccgcctggagcaccagttgccgtcctggcagagggcaacgacgcaagcttacgccgattaccggctggagggtgcacacgaggagttactggaactcgcgcgcgtggacgaaacggccgttgtcatccgtgacatcttagtgcaaatcaagcagcagatcgaagcggaggcaggggtcctgcatgggagctgaccggcagacgtctgttcaaggacaaggcacagcggcgccttccaagcgccgaaccgcttatgccacctggaaagcgttccgctggctgatgtcctatgtaagccgtcacaaaggctggatgatcgtcggtatcctgtccgcaattgccgccgcggttattgagatatggacgggacgtttggtcgagcagttgaccacacaggccgagaatggggcggggcctatcgttctgcagatcgtgtacacggtctttgtggtcatcttgatcggtgtgccggcgaagtttttcatgagctttggtgtggagcgaagcagtgcctctgcggtgcaggatatccgcaaccatgtcatgcgtcatatcggcaaactcccggtcccctatttggaaaagcagcactccggcgacgtgttgtcgcggatcaacaacgatctgcagctcatccagcaatttatgattcgggacctcgcccagtggttttatcatccgctattatttatcggctgtttcgcttatttgatgtatctccaatgggagctgatgctgtacagcctgctgttatttcccgtagcactgctggtttcccaatggatcggcaagcagttggaacagttgacggaggaagcacaggcgaacatgggccgaatgaacgtcaacctccaggatacgcttggggggatgcctattgtaaaaagctacctgctatccggtatgttatctcgctcctaccaagtgctgctacaattgacggctcaaaaaaagctggccgtgaaaaagcgggaagcctgggtcaacccgctgctttctacactgatgattagcccgatcattttcgccgtcagttacggaagctatttgatctacaacgggcagctaggcgcgggagaactgatcgccttcctgtacttgcttaatctgtgtctggagccgctggagcatattcccgagctcatcacgcgcacgttcgaaatgaccggtgccctgagaagggtctccgaaatcgtcgagcaaccgaccgaaacggaaaatggccgtttgcttccaaaagcgagcgccgcccccatccagtttcagaacgtaaccttcgggtatgaagagagttccccgattctgcgaaatgttagcttctcggtgccggaaggcaagacgattgcacttgtcggagcgagcggcggagggaagagtacggtgtttaagctggtatgcggcttttatccacttccggaggatcagggcgagatccgcgtgttcggaagcctgatccacggtgcagatccggagcagcttcggtcgcatttttccgtggtaacccaagattcatatttgtttagcggtacgatcgccgaaaatatcggctatgggcgggaagaagcgtcgatggacgagattatcgaagccgccaaagccgctcaggctcattctttcattatgcagcttgaggacggttaccagacgtatgtcggagagcgcggcgggtttttgtccggtgggcaacggcagcgcattgcaatggctcgggcgtttctgaaggatgctcccgttctgctgttggacgagcccacatcggcacttgatccggagtcggaaagcgcggttcaggaagcgttgggcgtattgatgaagaagagaacgaccatggtgattgcccaccggctttctacggtacaaaacgccgatgaaatttgggttatggaacaaggaagtattgtcgaaaagggcactcatgaacaattgctcgagaggaaggggctgtacgcccagtcgtattaccaggagtttaccgagtctgccgaacgcagggaggtgtcgtacacatgaaaaagggcggaaggctatcacaagtgaaagaactcggctacttgctgacgtttatgaaccgcaagcgcaaaacccagtacgcgattggccttgctgtaacggcgctcacccagacattgtttctgatcgccttcagcttggtcgtacataacttggttgatttcgccgtgtcccgagatacgtccctgatggtggaagcttttgttattttgggcgcggccctgttcctggaaaatataatttctccctggttcatttacttataccagcgcagtgtcgagctgactgtgctgaatatccgcaaacgtctttatgacaagctgtgccgggtgcggccgagattcctggagcagaaccaccatggggacttgctgtcgcgagtgaacaacgacgtaacgaccgttgagtttacattctcgcaggtttacttcgttttgctgcttcaagttgtcttctgcatcggctccattgtctctatggcggtgattgattggcggtttgctggcgtatccttcgtcattctgctgctgtcctctctggtcagcctgaaatttgcacgggatatccgcgctttgtccgaacaaggcttgcgtacgctcggtaaaatgaccgaaaaatttaaagattttatgggcggcattcaaattgtgaagctgtttcgcatccgcacgatttacggccagtacgaggcgttgaacgagcaaatgacgcaaacgcttcggcaaacggcgaaaaagaacggtatgcaggctgcggtgaaccattttatcagctacgtcacgttctgcggcatcatcgtcatcggcagtcttctttatgcttacggattgatgggaatgggaagtgtcgccgctctggcagttttgcaagtgaatctgacgcacgccttgttgaacctggggatggttctgtcgatgacccaaaattcgctcgcgggtgctcaccggattcaagaggtactaagcgaggaagaggaaccggagcgtttgggatcttctcgtagcgagcttgtatcggaggctgcggtggagtttcgcgatgtggaattttcctatcaggcggataaaaaggtacttgtcgacatgtccatgcaagtgtttcctggtcaggtcgctgcgattgtgggagccagcggcagcggcaaaagtacgctgattaagctgttgctcggtttttatcctgtggacagcggagatatcctgcttcagggtaaacctttcggccattacacgctggaagaaatccgcaggcagattgcatacgttccgcaggaaccgtttttgtttaccggcacgattgaggaaaatatccgctatggcaacccggatgcaacggatgaagaagtggtggaagcggccaaagcggcgtacgctcaccattttattcaggaacttcctgaacagtataaaacgccggtgggagagaggggagcgtcattgtcaggtggacaaaggcagcgaattgcgatcgcccgggcgattctcaaaaacgccccgattctactgctggacgaagcgacttctgcattggataacgaatcccagcattgggtacagcaagctctgaacgtattgatgaaggggcgcaccaccattctgattgcccaccgtctcagcactgtggaacatgcggatttgattacggtcatgaatcaaggaacggtcgtggaacggggccgccatcaggaactgctggcgctcggaggttactacgcgcggctgtacggctagacccgcttttcggcgggcggcttcctgctgatattcaggtataaagcctatctacaaacaatctctaatacgggagtgtgtcgatgtgagagagaatacgaacaagcaatatggattaacgcaagcccagcgccggatatggttcatggaaattatgaatccgggcacatccatcacgatgctttccgcgacctaccagattacgggcgagatcgacaccaagctgcttgagcaagcggcggcagagattgtcaaaacctatgacgctttccgaatccgcattagcggggatatgcaaaatccaacgcagtggttcgaagagctggagaatgtccaaaccaggataagccaccttgaaataggcacaaccgaacaattctatgcttgggtgaaagaagtaaccgaaaaaccggcgagtgtgttcgacgaacacctctatcaatttacgatgatccattttgcgaacggccaagtatggcttaatttgactataaatcatatcatcgccgatggcttgtccgtcactgctttgctgcatgcggtgatggaaaaatacctggaactgcgcaatggcatcttcagcagttatcaggccccatcctatctggattatatttcaactgagcatgagtatgagcaatcgcagcgttatcaaaaaggcaaggaatattggctaaccaagtacaagactttgcctgaaacgagcggcattaaatcggttccgccattctcgattggcagcgaatcgaataaacgttccatcactttggatggttcccgctatgaccgcattctggcttttagcgaacaatatcaggttagtttatatacgttatttttgtccgccatgtacgtcttattgtataagctgaccgacagcaccgatgttccagtcggcacggtgtttgccaatcgcaccagcaagaaggaaaaagaaacgatcggtatgttcgtcagcaccgtggctacgcggattagtctgaatccagttgggtccgtgctttccttgatccaaacggtttccaaggaaaatacggcggatctgcggcatcagaaatatccttataaccaattgattcaggatttacgcgaacaacacggccgcaacgatctttcggagttgttccgtacgtctctggaatatctgcctttgaaaatcgtggagtacgaagaaatcaaggtacgtctggaggctcactttgctagacacgagatggacgatctactgctgcgcttcgaccatatgctgaatgaaggccatgtcattctccatgcttcctatcgtaccggcctgttcgagacgaccgagattgatcgcattatggaacagtatgtaaccgttttggaccagtttcttgagactcccgaactgcgggtgcgcgagatttctctgttgagcgatgaggagagacaccgtattctggacgtgtttaacccgccggtggcagcactgagcgagggaatagcgtttcatcggtatgtcgaaaagtttgcccgagacattccggatcacccggcagttgtttacatggacaaaaagctgacttacggcgaattgaacaaacgcgctgagcggctggctgcgctccttcgtgaacagggcgtgggaagggagacgattacggggatctgggcagagcgttcggtggaacttctggtcggtgtgctcgccgtatggaaagccggcggagcttatgtaccgctggaccccgattatccagcggagcggattgagtacatgctcagcgatagcgaagcatcggtgctgcttacgcagcgtcatctgttggagggggccggaggttggctggccgatgaccggctgaagcttcaagctgtctatgcgatggacgatgaacagatgtataacggggatacctcagccgtggaatttgaatctgctgacagtgccccacaagacttggcttatgtgatttacacctccggtacgacgggacgtccaaaaggcgtcatgatcgagcatggtagcctcatgaatacggcggatgcgtaccgccgtgagtaccgattggatcagttcccggtgcggttgctgcaactggcgagcttttcgtttgacgtgttcgttggagacatcgcgcggacgctgtataacggaggaacgatggtaattgtgccaaaggatgaccggattgatccgaaccgcttatacggctggattcgggaccaaaacattacggtatttgaatcgacacctgcgcttatcctgccgttcatgcagcatatttatgaagaagggctggacgtcagctccatgcatttgctgattaccagctcggatgcttgcagtgtcaccgattaccgattgctgcaggaaagattcggcggacaattccgcatcatcaacagctacggcgttaccgaagcggccattgacagcagtttttacgatgagccgctggacaagctgccatcgttgggtcatgtgccgatcggcaaagcctggctgaacgcccggttttacattgtagatgccgggttaaagccggttcctgtaggggttccgggggagcttgtcatcggcggcgccggggtggcgcgcgggtattggaaccgtccggacctaaccaccgagaagtttgcagacagcccgtttgtgcctggagaacgtctgtatcggacaggagatttggcccgctggctggaagacggcaacgttgacttcatcggccggatcgactatcaggtgaaaattcgcgggttccggatcgaactcggcgaaattgaaacggccctgctcagtttcccgggggtcaagcaggctgtggtgactgaccgtacggatgagcaggggcaaaagtatttgtgcggttacgtggcgggggatgtttccttgcagctgagcgatctgctgtcccaattgaagcaagagctgccggcccatatggtcccggcccgactggtgtctcttgatcagcttccgctcacaccgaatggcaagattgaccgtaaagcgctgcctgaaccgaccggagagatagaagccggccgtgagtatgtggctcctcgcacaacgctggaaacaagacttgctcttatttggcagcaggtgctgggtattgtgcgagttggagtccaagacgatttctttgacctgggtggtcattccttgcgggcctccgcgcttgtttccaagattcgaaaagagctgcaagtcgaggttccgctgcgggacgttttccgctacaccacgatcgaacaacttgcccaaagaattagcggtttcaagcagcaggagacgtatgagattacaaaggcggcagaggccgagtattatccagtttcatccgagcaaaagcgtctgtacgtcctgcgccagcttgacgcggccgagcgtagctacaatatgtcggcggcgcttcttctcgaaggcaagctggaccgcacgcacgtagagtacgcattccgggcgttgattcagcgccatgagacgctgcgtaccgggatcgagcaggttcaaggcgagcttgtgcagcgcatctatgacgaggtggagtttgctgtagactatttccaggcgagcgagggagaagtggaccatgtggtggaagcatactatcacccgtttgatctgactaagccgccacttcttcgcatcggcctgatcgaagtcgccgaggatcgccacattctgctgttcgatatgcaccatatcgtctcggatggcatctcgacagcgttgcttttcgacgagttcagccgcctgtatcgtggtgaggagctggctccgttgcgtattcaatacaaagattatgccgtttggcagcattccgaagcctacgggcagttgatccagccgcagaaggagtactggctggaacagctgtcgggcgagctgcctgtattggaacttccgacggacttcccgcggcctgcggtgcaaagttttgacggccggaccgtgaagtttgatattgggaaagaacggacggagaagctgaaagaactggccgcacggacgggcacgaccctgtacatggtgctgttgtcagcttactcgatccttatgcataaatattcgggtcaggaagaactgatcgtgggaacgccgattgccggaagaacgcaagaagaagtgcagccaatcgtaggtatgtttatcaacacgcttgccattcgcagccatccggagcgttccaagccgtaccttaagtacctggaagaaatgaaggaaatcacactcggggcttttgaacaccaaaattatttgttcgaagatttggtggaaagtcttcatattccgcgcgcgaccggccggaatccgctctttgatacgttcttctccctgcaaaatacggagaatgagcaaattgtcatcgaggggctggagcaatcgttttatccgttggaaaaccgaacgtccaagttcgagctgcttctggacatttcggaactggatggccagctcgaatgccggttggagtacgctacggctctgtataaacaggagactgcggagcggttcgccagacattatgacaacctactcgaaactatcgcagcagcgccggaaggggatattgcttcgctggaaatgctaaccgagcaggaaatccgtgaactggtgcgcggttttaatgattcggaggcagactacccgcgtcagccgacgattcatggcttgttcgaagagcaggcgaagctttacccggataacgtggccgccgtcatgaatgagcggcagctgagttaccacgaactgaacgagcgatccaaccgccttgcgcgtaagctgcgggagacaggagtcgaagcggatcagttggtagcgattctggccgaacgttcacttgatatggtcgtcggaattctggcgattctcaaagcgggcggagcctacgtgcctgtcgatcccgactacccggaggaacgcatccgcttcatgattgaggattcgggcgcaccgttattgctgattcaaaatcatttgcatgagaagaccgatttcgcaggaacgcgccttgaattggacgatttcgtttggggcgacaaaggggaggactccgctgatgcactggacgcttcgaatctggaaccaatttctggcccgggtaacttggcttatgtcatctacacatcgggaacgaccggcaaacccaaaggcacgttgattgagcataaaaacgtcgtgcgccttttgttcaacgacaagaacctgttcgactttgggccgtccgacacgtggacgttattccactcgttctgcttcgatttctccgtctgggagatgtacggagcacttctgaatggaggaaagctggttatcgtaccgccacttacggcgaaaaatccagccgagttcttggcactgctgagccgcgaacgggtcacgattttgaaccagacgccaacatatttctaccaactgctgcgtgaggttttagcggaccatccgtacaatctgcggattcgcaacgtcatcttcggcggcgaagcactcagcccgctgttgctcaagggtttcaagacgaagtacccggagacaaagctgatcaatatgtacggtattaccgagacgacggttcacgtgacgtataaggaaattacatggatcgagatggaggcggcaaagagtaatatcggcaagccgatcccgacgctgagcgtgtatgttctggatgaaaaccgtcgtcctgttccgatcggcgtagcaggcgaaatgtacgtggccggtgaaggcctggcaagaggatacctgaatcgaccggatttgacggcggaaaagttcgttgattccccgtttgcggagggggaaaaactgtatcgctcaggcgacttggcggcatggctaccggacggcaacattgaatacctcggccggatcgaccatcaggtcaaaatccgcgggtaccggatcgagctggacgaaatcgagacgcaacttctgaacgtggagggcgtggaagaagcggtggtgctcgcccgtcaggacaacgagggagagaaggcacttgttgcctactttgttgcagaccggacgctgacagtcagcgaaatgagaacctcgctggcacagggaatgccgggatacatgatcccgtcgtatttcgtgcagctggagcgcatgccgctgacgtctaacggcaaagtggaccgcaaagcgctgccggagccgcaaggtagcctgcaaacgggcgtcgaatacgtagcccctcgtaaccttacggagtcccagcttgtgaagatctgggaggaagtgctgggcaactccggcattggagtcctggacaatttctttgagctcggagggcattccttgcgggcgacaaaccttgtcagcaagattcggaaggaaatgaacgttgaacttccgctgcgcgatgtgtttcgctatatgacggtagaatctatggcagaggctattgccagcttgaaagaatcgcagcacagctcgattccaaaagcggaagagaaagcgtactatccagtttcctctgcgcaaaaaaggctgtatgtcctgcaccagctagatagctcggagctgaattacaacatcccgagcgccttgcaattgaaagggaatttgaacgaggccaaaatggaaaaggcgctgactactttggtggcccggcacgatatgctgcgcaccggttttgaaatcgtgaatggagagccggttcagcgtattcatccgctcgtagatttcaaggtcgagaagcttcaagcaagcaaagatcaggtcgcggccattctggaaggcttcattcagccttttgacttgacccagccgcctttgctgcgcgccctgctgatcatacttgagaaagagaaattcctgcttgcgctggatatgcatcatattggttccgacggtctttccatggacgtgctactacgcgaatttgtggggctttacaatggggaagaattgccggagctgcggattcaatacaaggattacgccgtttggcagcaatccgacgagcaatgtcagcgtatcaaacggcaggaggaatactggcgcggggtattcagctccgagcttccggttcttgagctgcctcttgacttttcccgcccagccgtccggcagtttgatggtcaaacgctcacgtttgcgctggatgcggagaaaagcgaagctctaaaacggcttgccggagattcgggggcgacgctgtacatgcttctgctggctgcttactccgtattgcttcataaatacgcgggacaggaagatatcgtagtcggcactccgattgccgctcgttctcacgccgacctgcaaccgattatcggcatgtttgtcaatacgctggcccttcgcttgggtccgacggcagagcggacgttcctggattacttgcaggatgtgaaggaaacgacgcttggagcctacgagcaccaggactatccgttcgaggagctggtagaagctcttcaggtgagccggaatttaagccggaatccgctgtttgacaccatgttttctttgcaaaagcacgaaagcctggatttagccctggaaggtttgcaatggtcgctgtttgacatcgaggaaaagagagcaaagtttgatcttagcctggatatcgtggaagagggtaacgagctggtttgcaagatcgagtacgctacctcgttgtttagacaggaaacgatggtacggctggcgggtcattacgagcagcttttggcatcgatcctggctcagccggttgcgaggatctcggatttgaatattttgaaggacagcgaaaagcatgatttgctggtcgggtttgccgtgtcgtcttcggttctggcgaagcaatccgcctcagagggtccaggcttggaagcggatgagtcgtggagagagagaacgatccacgagctgttcgaggagcaagcagagcgaacgccggagcaggtggccgttgtctatgaggacagccgcctgacttaccgggagttgaacgagcgggcgaaccggctggcgcgatccttgcgtgcctctggcgcgcaggccgatcagccgatcgcgatcatggccgagcgctcgctggagatgattgtcggcatctatgcgatcttgaaggccgggggcgcctacgtgccgatcgacccgcaattcccgcaggagcgtatccgctacatgctcgaagattcgtgcgctaggctgctgctgatccagagccatttgcgggaaagcgcgtcatttgccgggacagagccacttggcggtctatcgctcgtcgatctgaacgatccatccgcgtatgatgaagacggctcgaacctggagccggcgagcggaccggagcacttggcctacgtcatttacacatcgggctcgacaggcaagcccaaaggcgtcatggtggagcaccgtccggtgatcaaccggctgctgtggatgcagaatgcttatccgattgactacagggatacgattctgcaaaagacggcgattaccttcgacgtttccgtgtgggagctgttttggtgggcttggacgggggccaaagtttgcttgctgccgccgggcggagagaagaatcccgagacgattctggacacgatcgaacggcaagccgtcacgacgatgcactttgtgccgtcgatgctgcacgccttcctcgaatatgtcgagcgtcagccgagcgaagatctgggtaacaagctgtcttcgctgaaacgggtgtttgcaagcggggaagcgctggcgacgtcgcatgtgagtcggttctggcagtggatttcgtcatccgtgaatcaagcgcagctgatcaacctttatgggcctacggaagcgacggttgatgtctcgtactacgattgcggaccggaagaggcgtatgtatcggtgccgatcggcaagccgatctcgaacatccggctgcatattgtcaaggaagggacgacagcgctgcagccgatcggcgtgccgggcgagttgtgcatcgcgggcgaaggtctggctagaggctacttgaaccgtcccgagctgaccgcggagaaattcgtagagtgtccgttcgcgccgggcgggcggatgtaccggacgggcgatctggccagatggctgccggacggcaacatcgagtatatgggccggatcgaccatcaggtgaaaatccgcgggtaccggatcgaactcggcgaggtggaggcgcaggtcctgaaagcggcgtccgtacaagagggggttgtcatcgccagagaggacgaagccggtcagaagcaactctgcgcgtacttcgtggcggacaagccgcttgcggcgagcgagctgcgaagcgcgctggcggaggatctgcctgcgtacatgattccgtcctacttcgtgcagctggagcggatgcccctcacacacagcgggaagcttgaccgcaaggcgctgcccgcaccggaaagcagtatgctcgttggaacggaatacgtggcgccccagacggcggcggagcagacgttggttgcggtgtggcaaaaggtgctgggaacgggtcgtccgatcggcgtgatggacaatttcttcgaactcggcggggattcaattaaatcgatccaggtgtcgtccaggctacatcaggccgggtacaagctggaaattaagcatttgttcaaatatccgaccgtagcggaattaagcccgtatctccagtcggtcttaagacgcgccgatcagggggcagctacgggagagacggggctgacgccgattcagcgctggttcttcgagcagttgttcgccgagctgcaccactttaaccaggcggtgatgctgtaccgggaggaaggctatgacgaagcggcgcttcgtcaggccgtgcggaagctggccgagcatcacgatgcgctgcgcctcgtcttcagctggaccgagagcgggtatgcggcatggaaccgggccatcgaggaaagtgacggcgagctctacagcctagaagtgatcgatttccgcggaatgacggactgcgcgcaggcgatcgaagccaaggcgaacgagcttcagcgcagcattgacctgcaggcagggcccttgctgaagctcggcttgttccgttgtgcggatggagatcatctgctgatcgcgatccaccacttggtcgtagacggcgtatcctggcggattctgcttgaggattttgctgccggctatgagcaggcgctgcaagggaagctgatccgtctgccgctcaaaacggactcattccaaacgtgggcgaaacagctcgctgattatgcgaacggtccggcgatggaaatcgagagagcgtattggcagcatatcgagcaattgacctatgagccgcttccgaaagattttgaacaaggcacatccaagctgaaggacagcaggctcgtgaccgtccgctggacggcggaggaaaccgaacagctgctgaagcaggcacaccgtgcttaccatacggaaatgaacgatttgttgcttgccgcgcttggcctcgcggtacaagcttggagcggtcgggaacgcgtgctggtgaatctcgaaggccacggtcgggaagaacttttgccggatgtggacattacgcggacggtaggctggtttacaagccaattccctgtcgttctggagccgggtcacgtccaggcgctcggtcatcaggtgaaacaggtgaaagaaagcttgcgccgcattccgaacaaaggaatcggctacggcatcctgcgttatttgtcggcgccgcatgacggcgagcgctttgctttagagccggagatcagttttaactatctgggtcagttcgaccaggattacgaaagcagcggctcgcagccttctccgttcagtccgggctccgattcaagcccgaatgctgtgatgaattatgtcctcgatatcaacggcgtggtatcggaaggcgtgttggaacttacgatccgttatggggaaacccagtatcaacgggagacggttgagcgcctgggcaccctgcttcaatcgagtttgcgtgaagtcatcagccattgcgtatcgaaagagcggccggagcttacgcctagtgacgtactgcttccagatgtgacggtggaggaactggagcggctgtcagaacatacgacggcactcggcgaactggagaatgtatacaccctgactccgctgcaaaaagggatgttgttccacagcttgctggatgccgattcggaagcctacttcgaacaggtgaccttcgatctgtatggaagcctgaatgtggaagccttcacccgcggattggatacgctggtacagcgaaatgaggcgctgcggaccaattttattaccggctggagagacgagccgattcaagtggtattccgcgagcggaagtgtgaagtgtactttgaagatattcgctcggcaagagatgaacacccggagaagacgatagccgattttgtcagcgcggataaagcgaacaagttcgatttggcccaaggctctctgatgcgcgttacagttttgcgtacgggcgacgagtcctaccaagtgatctggagtcaccatcacattttgttggacggctggtgcatgtccttaatgatcaaggaagtgttcgacacctacttcgcgttccaggagcaacggacgctggagcttcctccggttacctcgtactctcggtatattgaatggctggaagctcaagatgccgcgaaagcttcgcgttactggtccgagtatttggcgggttatgatcagcagaccaagctgcctcgggagaaaacagggctgaagcagggcgcttttgaagcagctgagatcgatgtggaactcagcaaggaactgactgggcaaatcgagcgggtggcgcgccagcatcaggtgacgcttaatacattcatgcagaccgtatggggactggttctgcaggtatacaacaacagcgaagatgttgtatttggctccgtcgtatccgggcgtccagcagagattccgggtatcgaaagcatgatcggtctgtttattaatacgatccccgtccgtattcaaggcaaagccgaggagacggtagccgatattttgagaaaaacccaggatcaagcgctgacatcgggagcttacgaaacgttcccgctcttcgaaattcagtcgctgagcgagcaaaagagcgacttgatcaaccatattatggtctttgaaaattatccgatggaagaacagattgagcaggttgtcggcggaggacaagaagcgctgaaaatcgctaatatccaatcgccggaacaaacgaactacgatctggacattaccgtcattccggaagagcatattttgctgcggtttacgtacaatgcactgacattcagagagcaagacatcaggcagatccacggtcattttgcccgtgcattggagcaggttgcggctaatccgaatgttcgtgtacatgagttagagcttttgacggcggcggaaaaagaagaaattgtcggcgtgtttaatccggtgcagccggaagtggctcctgtggcagcgttccatcgactgttcgagcaacaggcggaacgcacgccggaagcggaggccatcgtatacgagaaggatcggctgacgtatgcggagctgaacgagcgggcgaaccgcctgtcgaccacgctacgtgcaagcggaataggccgggagaccatcgttggcattctcgccgagcgttcggtcgatttgctggtggccgtgatggccgtctggaaagcgggaggggcgtatgtaccgcttgacccggattatccggcggaccgcgtgcggttcatgctggaggacagcggagcgaaggtactgctgacacaaatgctgctgcgagagcgtgccgaatcctggctcggcgaagaggaactggcactggagacggtgctgtatctcgatgacgaaacgtcatacagcgaagaccgagcgaatgcaccgatggacttcagccaaggctccagcagtgctcccaatccagtcaacagcaagctaacgggggctgtgaacggtggtggcgagagtcatccaaatgatgttgtgggcatggacagcttccatgaatcccgtccggatgatctggcttacgtcatctacacgtcgggaacaacgggtaagccaaagggtgtaatgatcgagcaccgcagcctggtgaacacggcggcaggctaccggcgggaatatcggttagatcagtttccggtaaggctgttgcagctcgccagcttctcgttcgacgtgtttgtgggcgatatcgcgcggacgttgtacaacggcggcagcatggtcattgtaccgaaggacgatcggatcgatccgtctcgtctgcactattggatagagcgggagcaagtgtcgatctttgaatcaacgccggcactgatcgtgccgttcatggaatacgtgcatgagcaggggctagagttaagcagtatggagctgttgattacaagctcagacagttgcagtgtggcggaataccgaaccttacaggaacggtttggctcgtcgttccgcatcatcaacgcctacggcgtgacggaagcggcaattgactccagtttctatgacgagcag

SEQ ID NO: 20 - DNA, 49103 bp, Paenibacillus xylanexedens
  source 1..49103: mol_type = genomic DNA
attattcggtggtggtttttattatatagttttattatgcagtatgggattaaagtacagattgaatttgttaatttatcagcacaataggatgtatacatgtaacgttattcgatacgaattgacgtttttttgcgtaataactagacttgtccgctctggaaaaacagttgtgttcatcaggcaatacacctgatataaccaagtacttttccttgacagtctaaatatcgctttgctaagatggcaataataaatttttcagaaaacgtattttcggcgtaaaatacagcctggaatcttcgggttttggaccgtaaagctgagcaaacataaggaggaacacttgcgtgtgggaagataaatttggtaaggaaggcctcacctttgatgatgtattgctagtgccacggaaatccgagacactgcctaaagaagtagatgtatctattcgtttgagtgatactgtaaagctaaatattcctttgatcagtgcgggtatggatacggtaactgaagcgacattggctattgccattgcacgtgaaggcggtatcggtattattcataaaaatatgtcggttgaacaacaggcagaagaagtagatcgtgttaaacgttcggagagtggtgttattacgaacccattctcactgacggcagatcatctggtatctgatgcggaagcagtaatggcgaaatatcggatctccggtgtacctattattgaaggagatcagaagctggttggtattttgaccaaccgcgatctgcgttttatccatgattacggcatcaaaattagcgaagtcatgactcatgagaatctggttaccgctcctgtaggcactacactacaagaagctgaaggtatccttcagaagcataagattgagaaacttccattagttgatgagacaaacacgttgaaaggtcttatcacgattaaagatattgagaaagccattcaattccctcatgcagccaaagatgctcaaggacgtttgttggttggtgcagcgattggtatttccaaagatacatttgaacgtgcagatgctttggtacaagctggtgtcgacctgattacggtagactcggctcacggacaccacatcaatatcattgaagctgtacgtcagcttcgtgaacgtttccctagcctgacgattgttgcaggtaacgtcgctactggcgcagccactcgtgacctgatcgaagcaggggcttcggtagtcaaagtaggtattggtccaggttcgatttgtacaacacgtgttattgctggtattggtgtacctcaagtaactgcagtgtacgattgtgcaacggtggcacgtgaatatggagttccgattatcgcggatggcggaattaaatattctggtgaaattacaaaggcactggctgcaggcgcacacgcggtgatgctgggaagtttgtttgccggcacagcagaaagcccgggagaaactgaaatcttccaaggacgtagctacaaagtataccgcggtatgggttcaatggctgcaatgaaacaaggtagtaaagatcgttacttccaagatgatgacaaaaaactggttccggaaggaatcgaaggtcgtgtcgcttacaaaggaccattgtctgatacgatccaccaactgattggtggtctgcgttcgggtatgggatactgtggtacaagtaacttggagcaacttcgtaacgatacaggctttatccgaattacaggtgcgggtctgcgcgaaagtcatccccatgatgtacagattaccaaagaagcacctaactactcgttgtaatctgaagagagttaatcatttccaggacaggctcggtgattttcaccgggtctgtctttttttgcagatacccctgtgatagaatagaacaagtggtgacgatccatggatggattaaggcgttgcggcggctttttgacgtgaatctatgaatatggttttgaaaagcaaatgcagtgccagaaaaggctgccaggtaaaccagaagcgcggacgtccttttacataagcatttgcaaaatgcggactaagtgacaatcgataacgaactttgggagcaataatattgctcgttcgatacagcgcatatagcacaacatctcatacatcaaacacacaggttagggaacaagaaaatcgcagcataagctgcactgaagcaattaacaatgctttggatcgaagggagtattcatcattgaaagccaaacacatgaataaaaagaaacgccaaatgctcaaaaagagcgtagcctcggtaatgctaattaacatgctttgcatgtctgcagtaatgccggtcatggctgctgtggacaactccagtcaggttctgactgctgcggcaacaacaacaaagacggaaaaagccgtaaaggtgcctggggtagactcacttgggcttgaggttagatcagcggtgctaatggaagcctcaacgggacagattctactaaatgttgatgcggataaagcgatgccacctgcaagtatgaccaaaatgatgacagagtacattgtcgccgaacaagtcaaacaaggtaaattcggttgggacgatattgtaactgttaaaaagaatgctgcacaaagtatcgggtcgcgaattttcctcgcggaaggtgaccagcacacagttaaggatctctatattgctatggctgttggctctgccaatgatgctacggttgctttggctgaacatgttgccggttcggaagaagctttcgtgaaaatgatgaatgatgaagcgaagcgtatgggcatgaaggatacgttcttcatcaactcttcgggtctggatcgagcagatatgcctgctgacttccgcccagctgaagacaaggaaacagtgatgtccgctctggatgctgcaattctatgccgatacatcattatggatcacccggactacacagaatttacaacgattcaatcctacaagttccgtcccaatgataaagctccaattatcaattacaactggatgctggaagcgaataaaaatataaccaatttcaaaagctatgcctatgaaggtctggatggaatgaaaacaggccataccacgaacgcaggtaataactttacaggtacagcagaacgtaacgggatgcgtctaattagtgttgttatgggcacagattcggaatccgcacgtttcagagaaactaaaaaggtattggactatggatttaacaactttgaagtgaaacaggctgttgcgggcaagaccaaagtgacgggctgggaagcggtacctttgaaaaaagggaaagaaacaaacgttcctgttgtaacagataatgcggtaagttttgttgtacccaaaggtactcagaacctggatgtgacattcaaagccaacgtaactgaggctgacaagctggtagcaccactcaaggcaggtacgaaggttggtacggtaacgtacacgtataaagcagagggaattgagccacaggaaaaaacagtgaacttgatcactgctgaagaggctgaaaaaggcggatggttccgtttgttcttccgtgctgtgaaggatttctttgtggatctttttgacggaatcaaaaacctgttctaagccttagcaaacttcatggaaagagtatgatcatgattttaagcttacatggtcatatcattgacaaaatacaagttattccgaccggatggattgtatatttacaatttttccggtaaaatatcaagttagaattcacgtatgatgaagtaaaaaagtacaatgttcgtttaccgtatgcaagatcgtggctggtaagagaaggggaatgagcgtatgaagatcggcgttttagcacttcaaggagctgtcacagagcatattcgaagtattgaacgtgctggagcagaaggtatagctatcaaacaggttcagcaattggagaacttggatggtcttatccttcctggcggggaaagcacgacgatcggtaaactgatgcgcaagtatgggtttatggatgccattcgggcgtttgctgctgagggcaaaccggtatttggtacctgtgctggcttgatcgttatggctaaacacattgcagggcaagaagaagctcatttggagctaatggatatgactgtatcccgaaatgcatttggacggcagagagagagttttgagacggatttgccagtcaaaggcattgaggagacggtaagggctgtatttatacgagcacccttgatcgagagtgtcggagaccaggtggaggtactctccacatacaaggatgagattgttacggctcgtcagggacatttgttggcttgctcctaccatccggaattgacggatgactatcgtctgcatacttattttgtagacatggccagatcctacaaacacacggtagactctaaataatgcatgatgtacaacctatgatctcccggtcatcggatcacttcaccagaagccgtgtaaggccactggttggcagttgcatctgaacggatgcctgatgttgcctgtatctgcttcatagcgggaatcgcagcggagggtgacaagggggatataggttgttttttgggttacaggttccgataagtatatagtaaggtgtatacagtagagttttgagaatggatttaacataaggcttcacgttgtgaggttatttaggaggggtatatcgtgcttgatgtgaaaatattgcggaatgagtatgcacgtgtagaagaagcattgactaaacgtggcaaatcgctggatcttatcgctggatttaccgagatggatgccaagcgtcgggaattgcttcaagagagtgaaaaactgaagagccgtcggaatacggtctctgcggaagttgctagactgaagaaaaatcgtgagaatgctgatgatctgattgtggagatgcgcgaagtgtctgatcgaatcaaagccatggacgaggaagttcgggaactggaagtgaagatcaatgatctcacaatggcgattccgaacattcctaacgaaagcgtacctattggagcttctgaagacgacaatgttgagattcgtcgttgggaagagccgaagtcatttacttttgcaccaaaagcacactgggaaattgcacaggatctcgatattcttgattttgaagcagctgccaaagtaacaggttcccgttttaccttttataaaggtctgggcgcacgtctggaacgtgcattgattaacttcatgatggatctgcacagcgatcaacatggatatgaagagattctgcctccatacatcgttaatcgggacagcttgtttggaacaggtcaactgcctaagttcgaagaagacctgttcaagttgaaagataccgaatattatctgatccctactgctgaagttccggtaacgaactaccatcgcgaagagattctgaatgtagatcaattgcctaagcactttgtggcatacagctcttgtttccgctctgaagccggttcggctggacgggatacacgcggcttgattcgtcagcatcaattcaacaaagtagagctgctcaagctctctactccggagacttcgtatgaagagctggagcaaatgactcaaaatgcggagcgtgtgcttcaattgttgggcttgccgtatcgcgtcctgacattgtgcacggcagatatgggcttcacttcagctaaaacgtatgatattgaagtgtggttgcctgagagcgacacttatcgtgagatttcttcgtgctccaactgtgaggacttccaggcacgtcgtgccaatatccgtttccgcagagagccaaaagccaaaccggaatttgttcatacattgaacgggtcaggattggctgttggacggacggtagccgctatcctggagaactatcaacaggaagatggtacggttgtcattcctgaagcattgcgtccttatatgggcggtgcaagtgtgattgcacgtcgctcttaagtaagagttagctaaccatcctcatcaaggggaatacaaattcaatccgtcatttcggaatggcggattggagtgttttgtataactgaggcagttgtctgatacgggatcatcaattttaatataaaaggttgcattataatgtcgagatgtggtatgatacttttcgtggcaagtttataaaagttaattccctggagaggtaccgaagcggtcataacggggcggtcttgaaaaccgttagggggcaactccacgtgggttcgaatcccaccctctccgccatactacacttataacaaggattcgagcgatatcgctcgggtccttttttgcgttgtgagtttgtccagcgtagtgagcatacaggttggtgaccgatgtatacgttgctcagtacaacgttatattttgaataaggctaatatgtataaaaacatcttcatcgccgcactttataggagtggaggtggtaagatgaaccgcgagttaaacatcgatcagacagagcttgtaggggcttggcaagaacgtttgcctcaagtcctgaatgttggagaccaggctcaggtaatggccgacgaagccgatcagcaggcgattcggatacacattgctacagcagggcacgagatgtactcttttgatttcaaatgtgcatatgtcgattcccgtgaagtcagcgtacagctgattgatgtggaacgggatggacgaacgacggatgagcgtacagaaccgattcaggaactggctcacgattatacacggcacattcatgaatgcgcccagtcgttacaatcccagacgagataatagcctgaaatctgaaggagtgaactcaattgactaaagccaaagcgggagtagacaaaaacctgcaaaatgtagtcgatgatctggagcaacctgccgtaaacagtcatcatgcccagcaaattcagcaagatattaatgatcgccgtcatcaggatgcactgaatcatgacaaaacggaagatagggacccatcccattcctaacaatgatgagggggcaataatatgagcaaaccaaaaacaattcccgtaccggaagcgcaagcatccgaacagcatcgtcattcatccaaacgctcttccatgcaggaaccattatccggttccaaaaaagtaaaaaatcaaaatcatgtggatcatttgaatccccaaggttaatagaagaaacagattcacgcaaaagtcccttgttacctaacagggggcttttgcgtattcatacatatataaagacaggcacatggttattcacaagctgatataggtctttgtagccattttaaagaggaaagatcacatttttcccaaattaggtttcggtatctggtgatatggtatatcattgatattgaattacttttttttggggttatcacgagaggagagaaacaaatgactaaacgtatgggggcgcttcttctcacgttgctgttgaccgtatctatggcattgacagcatgtagcagcaagcaggaaccaaaagaggcattgaagacggctgcggccaatgcttccaaattgacttcgtatgaaatgagttctaatttcaccattaatgaattgagctataaacctggggatgcttcacaaactgatcctaccatgactcagtttatgagcatgctgaaggatgctcagttgaatgtaacaggtgtataccaaagtgagccaatgcagacagagatgactcttggcatcgagcttaaaggcgacatgggtatgacctttaacatcccaatggtgatgacggcagagaaactctatgtgaaagtgccgaatattccgttcttcccgattccggagaacgttgtaggcaaattcctggaacttgacctgaaagaactggctgagcaagagggtacagaatggaaccctgatgctatggacgcagccaaaacgcaaaagctgagtaacgaagttatggacgcagtgctgagcgagtacgatcaagctaaattcttcaaaaatctagacaccaaagatgcaaaacttcctgaaggtgtagatgcgaagcaagttgtacaattctcggtgaataatgacaatgttaaggaagcagttactgtactggtaacaaaagctatgcctaaagtattggatattctgtccaaagaggaatatcgtgaaatgctgcaaatggatcaggctgatatcgacaaagctaaagaagatctgaagatcactgaagcagatcaggctgaaatggctaaagacttagataaattgaaagatgttctgacaatcaaccaattcaacatcgatttcgcattggacaaaaacgacttccctgtatatcaaaagatggtcgctgatgtgctgatcaagccagaaggtacaaaagacgaagtgaaattggcatttaccggttccaatacgtacaccaagattaacgaaaaagcagcattcaaaatcaacatccctactggcgatgacgtaattactatgcaagagttcgaagaactgatgaacgcttcatacggatactaatctcgctgagttcaaccgtctgtgattcaagtgaaggataatctccttccgcttgggtacaggcggttttttttgttagacagcgtaagaggggatatccgcaaaataatgatctttgattttgaatcgtggctggtgatctatactaataaaaccgcactctctcctacatagctagggtagtgcggttttgtacattaaatttgtatattttgaattggaatgcagacggttgagaggatacgtttcttcttaattagtttgcaagttcgtccaagtcttcagcaagtacagcatagatctgatgatcctgatatttgccgttgatcttgaggtatttgcgagcagtaccttcaaactggaatccgttcttctccagaacgcgctgtgagcctttgttggagggcaatactgcagcctgaatccgatttaacttcagcgcacggaagccataagctacggccagtttaaccgctgctgtcattcgtccgccaccctgataatctggatggataaagtaacccatatccgcataattggcaacgcccaatacgacattgttgatacttacttgtccaattagcaggctgtctttaatagtatagattccaaattgatatcctgtaccatcttctgctgccttgacccgatcctcaatccgccgagtctgagcatccagtgtatagaattcatcgtctcgcacgggttctacagactggtaggggacgcgtgtgaccttaatcaggtccaaataggactgtgtatcttggggtgtgagcaaccgaaggcttatgccattggctgtatcatagagtgttagtgccattacagcacacttcctttctaattgggatgtttgtagtcggtgactactttaacttttggcgcagacttctgaaaaattgagttagcatcgtggagcattcaggttggagaatatccgcaataacctcggttcgatggttaaaacgcggctcctgtagcagattcatcagtgtacctgcacagcctgccttgggatcagccgtaccatagataacgcggggaactctggattgtacaattgcacctgcacacattggacaaggttccagtgtgacgtacagagaacaatccaacaaacgccaagctccgatggtctcgctggcctgacgaatagccaccatctctgcatgggcggtggaatccagtgtagtttcacgcagattgtatccccgaccaataatttggttattttgtacgattacagctccaatcggcacttccccaagagcctcagctttgtaggcctcggcaatggccgctcgcatccagtgctcatgttgagcctcttcagataaattcccaagatcgggctggagagaatggtcattcattactatataactccttccaaaatcgtttattcagcgaacaaatattcgggttgttaacatgttgtgtatagaattgtggataaccgcgtagttgctcacatagttataaacaaactatccacaagcctgtgggtatgtggataaatatagtgattaatttcattgtagagttcgaaaatgcaaaaaacaacgaatttcgagctttttagtcattcggtaacttttggacacaggtcaattatccttttcaaaaagacatacaagcgttatgatggagataggttttgccatatatcgccagagggtacaagccgagaggtgaacaaaaaaacttgtctattaaaacgaaattatccatgattatgtcgtgctcagtgctcgttattttagtgttgaatatcgcactgagttattatactacagaagagaatctgaggcaggacagtgaaaccaagatggtgctcactgcaaagcagattgcaattgctgtcgaacagaatcaatacagttcggattatgtaaaacggcagattggaaacaatctgtggcttgctgctgtcatggcagcggaagaattggacccggatattaataatatcacaaatgaagaacttgtacgcttgagccaaaaggtcggcgtctcacatatttcgttaatggagcagacggatgatgacatcgttgttaaccgctcctcagatccgagagaaatcgggctgtccaccaaatccatgacttattggtatcaggcctttaagcaattatttgaaaaacaacaggtgacgattccccaagggcagaagttggagcatttctggtcagatggattcgaatattcgacatccagtccttcggatattgatatctggggttactaccatgatggaaagagaaactacataatcaatcccttctataataatacggaagttgatgactatgtgaaaatctctagtccggatgagattttaaataaaattcgtgaggtcaatccctccattctggagattacaggcatcaatccgttgacttttggcagcccgaacatgggtgatgacggaagagattcgaactttagcaagttgaataacagaccgattcgttttggtacataccagtatggttctacggatgaggatcatcgtgctgtggtgcgcgccattcgaacagggcaaaatgtatcttttgtcagtgaaacgcacgaacagaaggtactgaagagttttattcccattttcacacccaatcagtcttcctatgtgatcagtattgtcatggactataagcaaatatcctccatggtatctgagcagttggtgagccatgcctccatatcgttggttttgctggagattgtgatctttggcagctatttgctcgcagggtatattacacgtccgatccaatccatactgggcaaagtgaatgatgtagcggatgggcactttgatttccgtctgaaagtacggaggaaggatgaacttggccaactggccaatcgtattaatgccatgattcgtaatctgggccattatacgagccgtctgaaacagatgtatgaagagaatcgggcggtgaaagaacatctggagtccattatcaatcagacagcggacgccattcacattacggatcttgaaggaaaagtgctgcgggttaaccgcgcatttgaacaattatatggctttcgaagtcgtgaggtggaaggtcgtaatctgaagatcatcccgccagaggcagaagaagaaatgaaacgtcagcatgcccaactcgttgaagggatgtccattacgtccaacgaaaccacctggatgaagaaagacgggacccgagtagaggtcagtgtcagtacggctccggtacgagacgaggctggagagattaccgcgctcattagtgtctccagggacattacaagccgtaatcggatggaagagctgctgagacgttctgagaagctaacaaccgtgggccagcttgcagcaggtgtggcacatgagattcgtaatccactgaccacgctgcgcggattcctgcagttacagcaagagagcaacaagctgaatcatcgtcatctggatctgatgttatcggagctggatcgaatcaaccttattgttggtgaatttttgattctggcgaaaccgcaggcggttcattttcagaatcgggatattcgttttattcttggcgatgtcatctcgttactggatagtcaggcgcatctgcatggtgtagaatttgtactgcgtgcctcatccgattcggctatggtacactgtgaagagaaccaattgaagcaggtattcatcaatttgctgaaaaacggtatggaggccatgccaaatggaggaaacatccatatcaagctcaagcatgacgagcagtcgaaacgcgtcagaattgagatcagggatgaaggcattggtatcccggaagagatgatgcccaagcttggggagcctttctttacgaataaagagtctggaacagggcttggcctgatggtcagtcagcgcattattcaatcacataagggcatgatggatattaaaagcgtcatgaacaagggaacaacggttattattgaactgcctgcatccgagcaacaaccggaagttattgaggtagatcaggtaacagatgacacacttacagatgaagagaaatagatgaggtgagattaccttttgcgtattaataaatttattagtgaaacaggttattgctcccggcgtgaagccgacaagttggtggatagtggtcaggtaaccattaatggagttaaggctgaactgggcagtcaggcagaagaaggcgacgatgtacgaatcaatggcaagccaatcaaggaaaagagaaaacacgtatatatcgcgctgaataaaccgatcgggatcacaagtacaaccgagcagcatattcagggcaatatcgttgattttgtcgggcacgatgaacgtatctttcctattggacgtctggataaggactcggaaggtttgatcctgatgaccaatgatggtgatatcgttaaccggattcttagatcagaagggcgccatgagaaagagtatatcgttactgttgatcgatctgtaaccccgagtttccttagaggtatgagcactggggtgaagatcctgggtgaaatgaccctgccttgtacagtgacccggatgacggatcgagtattccgtatcatcctgactgaaggaaagaaccgtcagattcggcggatgtgtagtgcctttggttacgaggttcgtaagttgaagcgtattcggatcatgaacatccatcttggagaaatggcgacaggttcatggagagagcttacccctgctgaaaaagcggagctgggcggtctgttagactattcactggaatagttgatcgactttgactaatgaactgatcgaagccctgctttccgaaaaggagcgcagggctttttggtgcagatttaatgaagactggtcaataataccgaatagtacggaaatatgtagataaaccaggcataagccttataaaacccaaaagaccgttctccttgtaactggagaacggtctttggttaatgaatcgctgcaggcctctagtttcctccgccaacggcttttacatttgtattgttactttgatacttccgaatgatagatacctctacacggcgattctgtgcccgtccggtattggtgtcattgctggcaattgggtgatactctccataaccacttggtgtgaatttggaagggtccaattgcgagttcagcaacaggattttcaggaagttgagcgcacgatctgcgcttagatcccagttatccttatattggttgttcgaaatgggaatattatcggtatggccggatacaaccacttcatattcagggaactcctgcagcatgcttgagattgctttggccagggatcgtgattcaggcttcacatctgctcggcctgaggagaacagggcgttatcactgatggtgatcttcaattcagactgattaagcttggtgttcagctggtccgaaagtccgttcttcgagatatatttgtcgagtcgctctttgagtttctccaggtcttcttgttctttcttagccatctgtgcatctgtaatctgagctggtgttttcttggtgatttctgtaggttcctgtttgttcttacccaaatcagcacctggcgtatccggattcatggacgaatggtccagaatcccggaacctccatttaatgcactgtttagtgcggaagccatctgctcgaacttagctgcatcgattgaactcataccgaacaatacaataaacagagcgagcaacaaggtcatcaagtcggaatagggaagcaaccagctctcgtctatatgctcttcatgtggttcgtgcttcttagcctttttcacctggtgatccctccttctcttccagttgtttacgttcggaaggtgtcaggaatacggataacttttggttgatggcgatggtggagacaccggattgtatggataacagtccttcaaccatcatcagcttgatctccatttcttgcttggacatccgtttcagcttgttagacatcgggtgccataacacgtaaccactaaatataccaaggagtgttgcgataaatgctgccgcaatcgcatgggagagtttctccatgtcactgagatcggcaagtgctgcgatgagacctacaacggccccgagaaccccgagcgttggtgcgtacatccccgcctgagcgaagatcaaggcactgccacggtggcgctcctctgtagcatgaatatcttccataagcacatcacttacaaattcctgatcgttgccgtctataatcatacgcataccgccacgaaggaactgatcgtcaatctcttctacttttgattccagtgcaagcaaaccttcacgacgggtagtggaagcccaatccataaatgtgccgatcagggatacgcgatcaataagtacttgatttttgaaaacaatcccgaaaagcttagggattttcttaacttcagacatcggaaatgcgataaagatggttcctgccgtaccaacaaagataataatgtaggctgcgggattgttaaccaggttgattaagggcgcacccttcaagaacataccaaatacaagggagaccagccccaaaattagtccaataatcgttgaaatgttcatcatacacctcatccatgagataaaattgaatcctttcaagcggctgtgttcgggcttccggacgaatttttggccgcaatccgttcaatgttaggcattccttacggttgctaaaacagttaaaacggtcatatatgtatttatcgaccagaaggcctttttttttaagggctattttcaggtataataagatcaaatccgctccttaggggccgaataggagtgaaaagccaatgggcgtaaagcatggacgggattatgaaggaattttgacagatctgacaacggcaatcggacgcataccggatcggtatgttttctttgaaatggacgcggaagagtgggagagactggctgcatctgaccaacttgaagtggatgaggcgttggcggaggatctgttctatgcgctgggcgaggagtccgttattccggttggaagtggcgtggtcatccatgataaggaacagcaccgcattcatattttgatcggggaagaagagttgacatttgtacctttaatttagtgtgtttacttgcatctttaggggtgtaaatggaattggaattcccctcaaagccttatggttattggttctatgccatgtagttgattggattttgaagcttgtccgtggtaagatgttagtcgtgaaatgggccaaccgcatggcggtgagcctggcctttgaggttgctgttgatcgcaccgaaggtgtcggtggttatacggacgcatgtctgtaatgtaccatcctatggggaggaagataacgcatggttttttcgcaagaggaagtcgaagctcatctgggaaggctggaaggctgggaactggaagagggacggtggattgtacgtaaattcgtgttctccaactacatgaaagggattgcatttgtggatgaggtcgctgcgatctcggaagcattcaatcatcatccttttattacgattgattatacaacggttacgctgcgtctcacatcatgggatgcgggtggtatcacatctgtagatatcaaggaagcagggcaatataacgaagcttatgacaaaatgaggtcgcaataacgaggtcggttattatcacgcggccagaagtgagtgaaccatacatgtcagactataatcagaaacaacctcttattgctgtcgtaggcagtctcaatatggatcttgtggtgaagacagacacaattccggaagagggagagacggtgagcggtgaggagctgcattatctcgctggtggcaaaggggccaaccaggctgttgctgctgcgcgtctgggtggacagactacgatgattggtgcggtgggatcggacggttttggcgaacgtctgctgcacagtctgacggaaagtggtgcagatgcctcgaaggttcgcatattggaagacacggttacagggacggcttccatctggctctctcggggagacaaccggattatcgttattcctggtgcgaatgggcaagtggtgcctgagatgctggaagaggcggatacggtaaaaagcctgactgcagcggcagcggtgctgctacagctggagatcccgctgccagcggttacccgcgccgcccaactggcggctgaaggcagcgcactggtggtgctcaacccggctcccgcggtgccgggtctgccccaggagctcctgcggtgcgtcgacgttgtcacgccgaaccgcagtgagcttgccgtgcttactggccgggatcatctccggccggaagacctggatgcggcggtcgcagagctcgccgcatccctcggggccgctgtcgtcacgacgctcggccccgagggggctgtgtacgcggcggcgcctggtggccgcgtacaagcagggcgtgccggcgcgtgccgtgcgcccggctacgccgtaagcgccgtcgatacgaccggcgctggcgattgcttcaacggcgcgctggcggtagccctcgcgcgcggtgagactttggacgcggccgtaggctttgccatgggtgcggccgcgttatccgtgacaaagctcggcgcccagtccgggatgccgtccgcacgtgaagttgaggcctttctggctgagcatgccgcagaggcctaataattggtataacaaagaggctcttattctcccaaaaggggactaagcgcctctttgttatgcgtgtgcagagattatttcttctctgacagccacatggcgatatttgcaatctcttcatcctgcagtttgcccttgaaggaaggcataccacctttacctttgacaatcgtagaatagatcttctccagatcatcctggctgccgatgttggccagagcaggtcctacgccaccttgaagctgatccccgtgacaggagatacaattggctttgaccagtgcttcagcttgtccggcatccaatgttacttccggcatggttggcttggcttcttcagctacttcttctttccctggaagcgtaaacattaaaacaatagctaaagcgcatgctgcaaaaaatactccgctcatgatccatttgtgcatcccttatgtcccctccagaatgaaagatcatctaacctgaaactatccatatcattataacggaacctgtactgacatcatagcattttgtgggaattttttgaactaatcacataacaaggggcaaatttggttgttttgcaatggattctaaccgcgaggcccttcataaaccatacagtgaaagggcttcaagccgctgggtgtctgtcgttcgtatgtatcctgggtgacaaatccactcttcagatagacttgaatggcacgagcattccaagtgagtacttccagatcaatctcattcgtgggatttcggcgaatagcttcttgtacaatggcagtgacaaaagctgtcccttgaccctgaccacacagctctggatgcatgccaaggccaatccgggttaccccttgaagtgggaagtattgagcaaacccacatatacgatcgttctgatccaggacgatcgcatattgctcctgccgcagctgtgcatctccgaattccacttccagagctttcatctgctcccaggggagccagctgtagatattgtaaggcgggtcatactgccaactgcagataagctccgcatgttcttctcgcatgggtacaacgtgaaacgtcacaggggtttccttcatacacctgcatgctcctttccttgaaacagaactctttgtccactctacaaaagagatgttcatttagcaagtcttccttcccaagaaaaaaaatgaaacaaaagttccggtaatttcgtttatattataacgggatgggtaaaaacatcataagggcacggacgaacgaacgcaaaatgaacctgttgatgtagcaggatatgccccgagtataacttgcaacatgaataaggattgaagcacaaaaaaaccgccggatacattcctgcggagaatgtaccgggcggttctgttatgcttcttgcttcgttccagtatggttaatggttacagcatcatgttgctcagcttgtccctagtcaagggccagtgattcatatgcgtccgtgctcataatccgtttcgcgccaacataacgattggcccaatagttttcactcaatgcactgatcgtaacgcctttggaagaagaggagtgtgcgaactttccatcccctacaaagattcctacatgggatacgcctttacctgttgtattaaagaacaccagatcgccagctctcatctccatgcgggatacggaatcgcccatgtcgaattgggaactggattggcgtgccaaatcaatacccaacttgtcgaatacataccgggtaaatccggagcagtcaaagccgttaagcgttgttcccccacttttgtatgtagttcccattgctgaatcaattactgtgtccatctttgaatctgcgaatgcgctacctgcaccaagcgataaagcgaatgtgatgctaagtacagctgcggttaatttcttcttgaacaagagatattccccttccaatgcctgcgaggttagcttaaggattcggttgaaggtcccctatgatccctctgtagcaagatcaattcacccataactggttcccccgcttcccaggtgccaggaatttggctatgctagttatgcacctgcgaaatcaagaaatgacgatttaattttaagtagttacaaatatgaatgtaaagattacaaagttgttactaaaaactcactgcgattattgtaacagaggagtacggctttggcaacgtttagcaacaaatttagcaaaaaaaacctcgacctttgacggggaaaggttgaggtttgcctatttataagtacatattaggccatgagtttaacatgtgatggtaacaatttttaaactatctgctctcacctttggatattttggactgccataatcggaaatggctgcatattttccacagactcaatagacacctggcaagtggatacgtctgttgtagtataagtccggtaagtcccgttaataaccatgaggctgtagtgaatgccccaaagacgagcaggtgtactccgcccagcaggagtgcaatgccgattacggcgatgagatgacgcagtgcaatccagagggctttgagggtaccgtgggccccgccttctccttctggtgccgaaacaccgaactgcatgtagagtatgacatggtggatgatccaaccatatacaatccaggcagcaacataaggtataccaggcaaaagtaattgaagggaatgaaatccgtccatgagaattgagtaaagcttcggtatgagccagtaggcgggcagaagtatcaataatgtacgtatggtgtggagcagcagcatcggtttccacagatttttgattccgcggacaaaggggatgcgctcttctgtagaattaaagtgctgaagtgagtagagtattcctgcctgaatgagggggctgatcaacatgcgaaccagcagcatgccccctagaatccatagataacgatgaacctccggatgggtagacaggttaagttgactttccattttgaacaaaagtgtactcagctccccggcatcagcatctggatagcgaaggagcagtgggatgacggccgattgtaccattcgatagaagaaatatccccaaatgagttgataaagaaataagagtgcggcaatgaacatatgctgacggacgagaaaccagccttcacgtattttcgctttcaccgtttccacctcaccatgacagacctccgaatatggcttctattagtttggttacactcatgctccagcgggacttcgtctgctcatccagtccggatttcaggaaattgttcatatggcggttctccagcacgatcgagtacaggggatcggtcatggcccaggatacgggggatgtgtgagttaatttgtaagtgatgcgatcttctttgccattccattgcttggtgaggatatgcccgtcttcaaaagcaatgcgaataggaacggcgttgtaatcactccctttttttgcgatcgtcacggatgactcgtacaatgtttgaccgtctttctgtacgggcgtaacacgaatcttctctacagcaaagtcagccatcccgttactatagacgtattgatcaaaataatcagaccaggaagtgcgggtcacttgttccacaacgttttgaaaatcagccgaagtgggatgtttgaagcggtacttcttcacataggtagagagaatgcgttccatctttttggcaccgacttgttgttcaatgccgagtaatacaagcttgccacgtgtgtagacattggctgcatactcattctgtgaatcgaatttccaggattcttgtgttaaagatgaaggggacgtaatcagtcccgattgtactggcaggttcggaatcaatccgtattcctgctccattagtttgtcttctgcataagaggtgaacccctcatccagccaggcttcctcgaattcgttgctggcaaccatgccgtagaagtactggtgtccgatctcgtggactacggttcgttccaggtcataacctggcgtggtgtcatcggctccaaaggctgtaactagcgtagggtattccatacctccagcgccgttccccgctttgggtggaactacgatggataaggtagcataaggatatgggccaaaccatttgctataattggctagagcggccttcgcggcgtagaagtaacgttctttcagatcctgatgagctgggtccagatataacttgattcgtacaccaggcacattgggtgcagagaagggttcctcggcgtagacaaaatccggtgaagctgcccatgcgaagtcatgcacatcatcggcgtaaaattgatagaccttttctccattcttcaccacggcttgctgcgtcggaaatccggtagcagccactttgtatgtttcaggcacccgaatacgcacactatatataccgaagtcagcgtaaaactctgaattgccatggtactggtgcagattccagccttccgttgttcgtccacgtctgcccacaggttcataggcacttaatttgggaaaccattgacctgccatgacaaaatgatcagcagttcccatccgggcaaaaatcttcggcagattcacttcaaatcgggtgtggagcgtgatgctttccccgcctttgacgggtttgggcaagcgtactttaatgagggtggtgtccttgatatttccgtcatctggttgcacatactgcatccggtgcagcagagagagcccgtcctccgttttcatttcggtaatgttcatggagccgtagccattggtaggcatgacatcaccccgaagctttccaccggattccttcataaaggtggtgtcagcagaagagaaggcgttgggatacatatgaaagtaaagctcgctgacggtttttttacctggatgtgtccaggtaatcgtctgagtcccttccagtacattcccttcgaccagttttacatccatgtgatattccacaacacggttgctgtacacttcggcagtaggggtctgtacactttctggaggtgctggcgttggggctattgccttaggcttgcccgattcgggggcgagtactggcaattcggaatgagttgagcgattataacccagagtgatccatatccctccggcaagtacacacagggccagggatgcagtgagccagctcttggcgcgtcgtggaatcatcgttaaatacctcccgttgacaagcatctacagcatgtatatgtttgcaatggggcaattattagttaaaatatttgtatcaacccttggaggttataaacatggaccaaaatgagcaaaacggcaaaaaacagattgccttgaatatcgttagtgcaaaaagcaagcataaaggcttcggtgcaggctccattgagctgaataacctttccccggtcattattgataatggcgaagccaaaatcgatatcggtgcgatgcatgcgaagagcaaagtggaacgcaatatcaagttctctaccaatcgtgaagatgtgcccaacggacgccaggtatggctggtatgggtagctgtcgatcgcacggaggaaggccaactgtatggtggagcaacggcatgtgagatgtggattgatacggaagcaagacgtggatggaaactgctggcggaacatgtgaatcgcatggattatgctttgaagcgtcgcttcatgctggatgagcttggacctgaagctcgagctgcacttaagacactgctgatctcacacaacgaagactggtggaatgcttctccagatgtattgaaggaagcactcgcctaaggcagatcattttcaacaaagtattaaagcaaagaaagcaaaaggccccttgaccggaaagttcggttgggggtcttttgcttgtgccttaatcgtattcatcgatctgaataattatgagttttcatccaaagtgaatttccaattgtttaatataaccagatgttataggtgacgcaactaagtcatcgcccatttacgtcattctacccaccaacgtttgaaatctccccaccaagaatgtttctcttcctgtatgccttgttgattctgtacctgacgggtcttctcatcttctccagaatccaaatcatccgtcgtaccatgacatacctctgtcggttcagtaccatcaataaaaacttccaatcgtttctcttcacaaccgttgcctgccagcttgccggattccggatcaatatagacacttacgacatgatcaggcacggtgaagattttgggtggtacgctcgcaagtgcctgctctgtgaactgggcaaagatcggagctgcccggcggccatccgaagtcgagatggatttgccttgatcgtaaccaacccatacagcggtggaaagctccggtgtgaatccaacgagccaggcatccgtgttggttgttcccgtttttcccgctaccggacgtttgatcgccttagacacgcggttgcccgttcctccattttcgaagacactttccattaaacgagtcaggacataagctgccgcaggttccacaacggtctcagccttcgtctgaggcgattcatagagcacacgtcctgcggcatctgtcacttgcagaatggcgacaggtggcgtccgttgtccaccagcagcgatgacggaaaaggccgacgccatctccagcggactaacaggtgaggttcctagtgcaagagatggcacggcgctcaggttacttgtaatacctaggtttttggccatactcacaacctgttcaggaccgatctgcataatggtgttcaccgcataaatattgtctgaagcggcgattgcctgtcttagatcaatctcacccagatacttgtctccaaagttgccgggtttataggttttgcggtcattgtcatagtgaaaaagggtaggttcactgttaaatatggatgcactggtgagctgcttggactccagggctgccagatacataatcggtttaaacgccgaacccggttggcgtgtagtcgctagaacatggttaatctgattggtacggtaattcttgccgcctaccatggctttgatgtagcccgtacgagggtcgatggacacgagggccgtctccagctcacttttggcatccatacccttcgctatggcgtcttccgctgctttttgtacacgcagatccagggtggtgtagatgttcaatcccccatgatccagcatcgcttcactgattcccaactctttgatggccagattccggatatagtcacggaaatacggggcgctttccaccgttttacgctcactttccggtttgaacgaaagcattttctcataggccttatccgcttcggcctgggtgatcttgccgatatcagccatggcattcagcacaatcttctgtcggtctttggcatttttcatatggttatagggtgaatagtaggtaggtcctttcgggattcctgccagcatggcactctctgcaagatccagctgtttggctgatttgccaaaatacattcgtgaagccgcttcgattccgtacgcaccatgcccataatagatttcgttcagatacatctgcaaaatttcatccttgctgtatttcatctccaattgcgccgtgtacatggcttccttggctttgcgagtccatgttttctcatgagatagatataggttacgcgccagctgttgagtcaatgtactcgcaccttgcgacatctgcatatgttcgaggttaacgagcacagcccgtcccatcccttgcacgtcgaacccgtagtgattatagaatttgcggtcctctacagccagagtggcatggaccagatctggagcgatatcctccagttgaacgggtacagagtctttgccacctgcggagaaggtagcgatgacttcaccctgactgtccagtaatctggaattccggtcagagtctgcgaggggcaggctggttgcgtatagatagaccaatcctgcagcggtagcaagtatagcgagcacggcgagcagagacaggtttttaatgaattttcgtacagggaacccgcgtttgcgggtcttttgatttggcttggtcatggaacgggctcctctcttttcttccagtatgggacttgattggcagggatattcaatcgggtgcataagcaaacaaaatgtagcattttcgccttaaaaaccgttttgcagtataaacgtcaatcgcgtataatgcaaaagggtaatgaaaaggtaagattcggcacaagatactaaagcgcgtaaggacgaacagacgaatggtcattgattcattgattagtcagacgctctgcacgctctggtcaatttaatctatataatgaagtgaaccgtggacctttcccgcaggccagcaatgataacgcgatatggcgccgaacgctggacgtgcttgggcgaaccgattatagtgcacagcgcttgatcgggtatggctgatcattaactttacggaaagaaggtagagattatggaattgtggtttacggagaagcagaccccggtattcgggatcaccgcgaagattaagcagacctatgttacagagaaaacggattttcaagatttggccatggtagagaccgaagaattcggtaacatgttgcttcttgatggcatggtgatgacgactgtaaaagacgaattcgtatatcacgaaatggcggcacaccctgcgctgaacactcacccgaatccgaaaaaagttctggttgtcggtggcggcgatggcggagtcattcgtgaagtcattaaacatgctgctgtagaaaaagcagttctcgtcgaaattgacggtaaagttattgaatactctaaaaaatatttgcctgaaatcgccggcaagttggacgagcctaatgttgaagtgctcgtaaacgacggctacatgcatattattgaacataaaaatgaatacgatgtgatcatcgtagactccacggagcctgtgggcccggctgcgccattgtttgagcgtgggttctaccaaggcatctacgaagcattgaaagaagacggaatcttcgttgcccaaacggacaacccttggttcaaggcggatctgatccagaaggtgaacaaagacgtcaaagaaatcttcccgatcgtacatgtgtacggctgtaatattccaacctatccaagtggtttgtggacattcactatgggtagcaagaaacatgacccgcttgaagtggatgattctcaaatcccggagatggataccaagtattactctccgcgtctgcacaaagcagcatttgtacttcctaaattcgtggaagatttaacgaaataaaaggggaaatcattaatgaaactggatcaagcttattcaggaaacgtatttatttgcagctctgaggattatgagaactccaaagcagttatctatggcatgccgatggattacaccgtcagcttccgcccgggttcccgtttcggcccatctcatatccgtcaggcatcggttggacttgaagagtacagcccatatctcgacaaaagcattgtagacatgacatactttgacgctggagacctgctcttgcctttcggtaacgcgggacgcagccttgaggtaattcatgaatacatcggcagtctgctcgctgacgacaaattcccagttggtctcggtggcgaacatctggttacttggccagtcatccaacagatgtacaagaaatacccggatcttattctgattcatattgatgcacacgcagaccttcgtgaaaactatgaaggcgagccattgtcccactccacgccagtacgtaaagcagctgagttgatgggtggcaaaaacatctatcagttcggtatccgttccggttcccgtgaggagttccagtacggtcgcgagaacatcaacttctatccatttgaagtggcagctccgatgaaggaagctcttccgaagatgggcaaccgtccggtgtatgtgaccatcgacatcgatgtgcttgatccgtcagcagcgccaggaacaggtacagcagaagcgggcggcattacgtccaaggaactgctggaagccattcatatgatcgcaggatctgatgtaaatgtagttggttgtgacttggttgaagttgcaccaatctatgatccaacacaacagacacagattgtagctgcgaagctgattcgtgaaatgctgcttggattcgtgaaataatcacagaataatcgataagtataacgctctctgtctgcgcgggttcaactttgcgcaggggagggcgttttgtattgttaacttttgtacagagctgtgctatactgactacataagtattcagtagtatattaattgatatattacattcgtgaagtatatggtgatcgggttcggtcatatactaaaaagagcctttaccgctgccaacggtaaagactcttaggacccgaaaggctgtggattgccacggcgcgcatgaactaaataatgctattcaagcaaaacccaccgtcaggcttccgaccttatgaggtgggttttcgcttgctacgaaactttttgcgtaaccaacggtaaagctttcgcccactcagtacaatactgaggatcgcagcaatccatcgaattacatcaagcaacgccacaagtttgaccaacgacgtcaccccctttcgggaagctgcgccgtggtctggaaaacatccaccgatattcaaaagtccataacattaattatagcacgtatgttcccttgcctctaccatttatttcatgtatttagtatagctcgcacatgcagatttcctgccttggcatgactccatcttaatatttatgccttttattaagtatcagttttgttatccttgctgtggtgacgtatcccatttaacttagagagtacacaatgtttggtgatgaaccacccttgtctacatgatccaatcatgggtaaaggtggtttttttcttgcaaaattgtcatcagggttaatcagattgttacgttagaaccatcatatttgggtaaaaccatagaaggaggtgttacgatgacaaccaagagtacaatgacatggaaacggattagtgcactcgcattatcgttaacgctggcttgggggatgggtccggtacatacgctatcaggtgctaacgctgcatcctcacaggcatgtggaaagggagatcatggactatctgctacattaaaaaagggcagcggtgtggaagagcaacacctgcaatttactgacattgattttcttaatgatacgactggacgagctgggggtgaaggcttcctgatcggtacctcgaatgcaggatgtacgtggcagtccatatataccgggcagtggcaattcactcagcttgattttccgaataatgtgaacggatatgcgctggcgcgagtgaaggattcacctgcaacctatctgatccgtacccatgatgggggatcgcactggacgcggctcgatacgccgggcattcaattcaagcgaattgattttcgcaataaagatgtaggttatggttacacctataatggtgcatatcagacgaaggatggcggggtaacctggagtaaaatgaatacacctgccaacacgcgtgcagctgcctttgcaacagagaaacaagggtatgccgtcgtggttgtacctggatcgggatatcatctgaagcaaacgagtgatggcggcaagaactggacaacctctcttcgagttgtctcagacacatggagcggaggggatctgtatgcacatggccagcaagtatgggcccttttgtatggtgatgcaggcatgtcccaacaatcgtactccctctatgcgagcggtaatcaaggcaagaactggacccaagtatttgcacaatccacagcagggggaggtcctgcaccgggtacaaacagtacgggcaaaggaaacggaccagccaacccgggtggtcatcccggcaacatggcgttgattggtaatcagacggcgtatctgtctgcaggttcacccgcagctggcaaagtgggtattggacgttcttatgatacaggttccacgtggaaaaatattgacctgaaagatccgggatacagttcccgtatctcgttcccatcggccaagacgggttggctcgtagtcacaagtgataactctcctgcgatctatcagactacagatggtggaacgacgtggacacaaaaaatgttgttgccttcagagcaggattaagtagtctcttattctgaaataataaacgggcaaatccaaattagaaatgtataaaaatcaatttggtaagtctctgtatgaatttctataacaaacaagcctcttcctaatcaattacacaggaagaggcttgtttgtgtagaaataaaaacggttgaaacctactctaaaacgagttattgtaagcgataacaatacattatatggaggttgaaattatggttgatgttattttaaaggcggattctgataaaggattaataaatcgcaatatatatggtcacttttccgaacacttgggacgttgtatttatgaggggctgtgggtaggagaagattcacctattccgaatacggatgggattcgaaatgatgtattgacggccttgcagaagcttaatattccagtacttcgctggccaggcggttgttttgccgatgaatatcactggaaagatggtgtaggtccgaagagtgagcgtgctcgtatgatcaatacacactggggcggtgtggaagagaacaatcactttggtacacatgaattcttgagattatgtgagttgctcggcacggagccatatattagtggcaatctgggtagcggtacagtgcaggagatgcaggaatgggtggagtacatcacatttgacggcgaatccccgatggcgaactggcgtaagagtaatggtagggaagaaccgtggaaaatgaagtattttggcgtgggaaatgagaactggggatgcggcggcaatatgcgtcctgaatattatgcggatgaatatcgtcggtatgctacatatgtacgtaactattccgggaacgagatttataaaatcgcttgtggacccaacgaaggcaactatgaatggatggaagtcctgatgcgggaggctgctcgctttatggatggaatcagtcttcattattacaccatccctacaggagagtggaatgataaaggcgcagctacaggatttggcgaggctgaatggttcactaccttgaaaaagacgctccatatggatgaattactggtgaagcactccgagattatggacaaatatgatccagagggcagagtcggcattattgtggatgaatggggcacgtggtataacgttgagccgggaaccaatccagggttcctgtatcaacagaatacgatgcgggacgctgtgcttgcaggtgttaacctgaatattttcaaccaacataataaacgggtacacatggcaaatcttgcgcagatcgtcaatgtgcttcaatcgcttgtgctcacggaaggggacaaaatgctcctgacccctacgtatcatgtatttgatatgtatcaggtccatatggatgcacagcgactggatttgaattatgaaagcccaggatacacattcggagaagagaccattccgcaactcagcttatcagcttcccgcaacaaggatggggtcattcatgtgacagcttgtaatctgagtcacacggatgagttggaagttgtgtgtcagctggacgcagctcaagcggctaaagtaaacgggcagattctgcaccatactgattttggtgcatttaatacctttgaacagccgaatcatgttcagcctgtggcgtgggatggaatcacactggagaataacacactgcgttttgtccttccaccagcatcggttggggtgctcgctgtcgagggttaatgcatgaaaaggcaggaaccttgcaaaggctgtaatgatcagtacgatgtgaagattagcgatgccaaaatggccagacttgtggagattgcctcacgttcgcgtccgacggtacaggatgaggaatatgaacgtcggctatccatctgctctgcttgtccgggattgcaatatggcacaacttgtcggcattgtggttgtctcgtacaggtgcgagcgaagctgagtgagtcgacatgtccttttccttatgaatcccaatgggactgatcggaggaacgaatcttattataatgaagcaaaagggagttgcactttaccggtgcggctcttcttttttggcttgatgaggaaaaaactctgaatttggatttgaattgagcgagggaactggatatagttatacagtagagtgtaggatagcgagctatccgggaatatgagcgcgtatagcgacacaacaatacgggaagggctgttctcaccagccgtgcctgattttgcgtcgcctcgaatataatggaggttaacattcatgtcgaacatgcgaccggtacacatccggctgcacagccgttatgaaggtgaagatgtgctgcaggaaatgcagggtgaagccgtgttaaaagggtctgttctttatgttcgttatgaagaaccgcaggttggacctgagggaggtacaacccgtacaacattgaagctgggccgacaatccatcaagattatacgtcatggtgaggtggaatcggagcagacttttgagttgaatcggaagcttcctggtttctaccgatcaccatacatgtcgtttgccctgtccacgcatacacagaagctggaactttccattcagggattgagcgcacgcgcagcgtggagctacgacttttaccgctttgatgaagaatctggacatttcgcgattagtttgcatatacaggaggaaccaatttcatgacacgtaatccactagatacgattaacgaacgggtaagtacggccatcggcaacgccattgtgacggccggaattgttacgcaggacgaattgccagccatcacattggaagtgccgcgtgagaagacacatggagacttggcgaccaatgctgccatgcagctgaccaagattgccaagcgcaatccgcgtcagattgctgaagagatcattgccaatctgaatctggctgaagcaggaatcgagaaggctgagattgcgggcccaggattcattaacttcaaattggacaagagttacctttatccagtacttgcgcttgtgcaggagcagggtaaagattacggaagaattaacatcggagaaggacgcaaagtcgagatggagtttgtcagtgccaacccgacaggcagcctgcatctgggtcatgcccgtggagcagctgtaggtgatgcactatgtaacatccttgactacgcaggatatgatgtaacccgtgaatactacattaatgacgcaggtaatcaggtgtttaatctggctcgttccattgaagctcgttatctgcaagagctgggtcaggatgctgagatgcctgaagacggttatcacggtgaagatattaaaggattcgccaagcagcttgttgctgaaaagggtgacgaattgctgtccatgcatccgggtgaccgtgcggcttatttccgtgactttggtctggagaaggaactggacaagatcaaacgtgacttgaatcgcttccgtgttaactttgacatctggttcagcgaaacttccctgtacgacaacggagaagtactgcgagtgcttgatgaattgcgtgaccgcaatgagatctatgagcaagatggagcaacttggttaaaaacgatgcagtacggtgacgacaaagaacgtgtattgatcaagaacgatggcacgtatacttacctgacgccagatattgcttatcaccgcgacaaatatgctcgtggatacgacacgatgatcaacatctggggtgccgatcaccatggatatattccacggatgaaagccgcgatgcaagcactgggtaatgaccctgagaaactggtggtcttgattgcacagatggtgagcttgttccagaacggtgaaaaagtgaagatgtccaagcgtacaggtaaagctgtaacgatggaagacctgatggatgaagtcggcattgatgcgatccgttacttcttcacaatgcgcagcatggactcccatctggactttgacatggaccttgcgatctcgacatccaatgagaatccggtattctacgtacaatacgcgcatgcacgtgtatgcagcgtataccgtcaggctgaagaacaaggtattgaactgctgccactggcacagattgacctgtccaagctgacaacagagcacgagtatgaccttctccgcaaaatgggagagctgcctgaggaaatctcggcagcagcaacaggatatgcgcctcatcgtatcatccgttatgtatacgagctggcatccctgttccacagctactaccgtgcagaacgtgtcattacggaagacacgcagcaaactcaagcacgtctggcactgatcggtgctgtacgcaccgttatcgcaacagcgcttcgtctggtaggcgtaaccgctcctgacaaaatgtaaattccaggctcgcggcctatccgtcgctctgcctaaggcaaaaagtctccatgtccatgttgagtgccttcaacgtggtacatggagactttttttgttgtgtaccctagctgaagaaaacgaaatgcctggtccaaggcacactagcctgcgctgacatcacagcaggcgtaacctagagtctcagccgctacgtaatactccctcgtgcgtactgcctgggccgggctactgcgtttcgccacgaagcctcaatcaagttctgctgacggatgactgagctggctcactcgccgccctcctgcattagcttcagggcatcaatctcaccaccacgcaccttgctttttgcggtggtggtcttccgggcgcgcagcgggatcgtagcacgtttgacgagtgtcttgatttcactaggggataaccccggatgtttggagagcagcaaggcgatagcgccactcacatgggacgtcgccatggatgtgccgctcatctcgtgatgtttgccttgtacccaggaggagacaattttatcaccgggtgcatagacatccacatatgcgccacgattgctgaaggacgcaatacgtctgtttttgtcggttgccccaacagatatggtctggggataccgtgcagggtaatcaatactgcggcgtttgccgtcatttcctgacgaagcaacgataacgattccagcatggtatgcacgattgacaacgtcaagaagcgccttgctgcgtgttttcatgccaaagctcatattgatgatatcgaccttgttgcgcacacaccagtcgatgccaagtacaatgtcggatacataagccgatccgttgtggtcaaatgctttcaccggatagatcagggagcgtggagctacaccaatcatgcctgcggtactgttggcagcagcgatagtccctgcaatgtgggtgccgtgtccgttatcatcatgaggaagcaggctgcggtttaacaggttgattccacgtgccagtgaataacgaagatcaggatgatgataatcagcacctgtatcaatcacaccgattttaatccggtgtccggtagacacagaccatactttgggcgcccgaatctgcttcactccccagggtatgccttgagcgttgcttggtttgctgtggagtgcagtggcatgaagggagatgggaacgtcttcttcaatcgtaatttcatccccatagcggtataggtcctccgggcgttggactggagcgataatggaacgagccagtcgcgaggaacggacagccccaaggtcggtgaattcaatccgcattcgggacaattctacgagacaggcctcgtactgctgcggtttggcaaatcggatcaaatatcgccctccctgttctggttcagggcgtcgcattccgtcaatcaattgatgcaataaaccagtatagtccataatgggcagcccccttcgggatgaacatgctgaggtattctatgaatgcgctcatcccgccgcatggggaacttgccctttttttacaaaaacacattctcttcgtgtcaaaacgggcgcagggacatatgatggatggagagctagagggctcttgcggggaacctggtgaggagtaatcctccaagggtatacagtcagaaggcggaggggactccgtcttttttattatggagttgtctctttggcaaagaggatattcctgtgggtttgatgtcacttcacgtttaatatgtggacatattgttgctgctctccgcatttgcgtcacatccgtacataaaaacttgctttttaacgctaaataggttttacttaggtttgttaatggatatgttatacgtaacagtccagttcgtaggggttaaaaagtgaattttgtgtgagaggaagtgtctgcagtgagtacctcgctcaatttgaaaattgataaagaaaaggtaaaagagatccctttggtggaccttgcctttatggtgctgaaagcggctaatacgccgtattactatcgtgacttaatgaatgaggtagcgaagcagcgcggaatgactgatgaagaaatcaacgagtttatcgcccagctatataccgagattaatatcgatggccgttttgcttgcgtcggtacaagtctgtggggcttaaagcgctggtatccggtagctggaacagaagattccatgacgggtgcgaagcgtccgcgtatcatcaacgatgaagacgatgatctggaagatgaagacttcggtgaagaagaagacagctatagcagcgatgaaggcttcgacagcacggataaagacgaagaagaagacgaagaagaggaagaagaagacgacatctttgacgaagaagacagcgaagaagaagtgctggttgaagatgacgatctggaagatgaagacctcgaagaagacgaagaagagtccgaaaacgaggatgaatttgacgacgattctgataatcggtagtcatttttgacgtctataatttacccgtttccccggaatagtcagccttgacagcagacggggtaacgggtaaactattgcatgggcttatgaatgagcgacaatatatttatgttttttatagaaggtgccccgtcctgcgggagtacttttttttgtatttttagaggcataattttgcaaaatgattttttccgtatgctcccggccaacatttcgtggcccgtttttgtatatcaaaaacaccaaatggaatgaaggccatcggaatatttgcaccattttttgctgtagaacaacgtgtatttaaacggtcttcgcagaaagagcagttcgcagatgcagggaatttctgccattgctctttttaacgatgattacctgggaaacaggttacgataacaccatatatcgcctgaatttctgtacttatattaggagggtaataacagtgacaaagtatattttcgtgacgggcggagttgtgtcctccctgggcaaagggattacggctgcttctctgggcagattgctgaaaaacagagggcttaaggtaacgatccagaaatttgatccatatattaacatcgacccgggaacaatgagtccttatcagcacggcgaggtttttgtaacggatgatggcgcggaaacggatctggaccttggccactatgaacgttttattgatatcaatctctccaaaaacagcaacgtcacgactggtaaagtatactcttccgtcatcagcaaagagcggcgcggggaatatctgggcggaacggtacaagttattccacacattacgaacgagatcaaagagcgtgtattccgcgctggacgtgaagcgggttcggatgtggttattacggaaattggtggaacagtgggcgacattgagagtttgcctttcctggaagctatccgtcagatcaagagtgatgtaggtcgcgacaatgtgatgtacatccacgtaacacttattccttatatcaaagcagctggtgaagtgaaaacaaaaccaacgcaacatagtgttaaggaattacgcagcatcggtattcaaccgaatgtgattgtatgccgtacggagtatgaattgtctaaagacatgaaagccaagatcgctctcttctgcgacattgatgagaatgccgtggttgaatgtcgtgatgcagacacgttgtatcaagtacctttgaacctgcgtgaagaaggcttggatgagatcgtggtaaatcacctgaaactgactactcctgcaccggatatgagcgagtgggaagggctggttgaccggatcaacaagttggagcatacagttgagatcgctattgttggtaaatatgtagcgttgcatgatgcatacctgagtgttgttgagtcgttgtctcatgcaggatttgcatccaatgctgatgtgaaaattcgctgggttccttctgaagatattacggatgagaatgtaggcgacctgttacatggtattggcggtatccttgttcctggtggattcggagatcgtggtattgaaggtaaagtatcggcaattcgttatgctcgtgagaaacaaattccgttcttcggtatttgcctgggtatgcaggtttccgttattgagtatgcacgttccatcgttggcttgaatggtgcgaacagttccgagattaatccggctacggaattccctgtgatcgatctgttgcctgagcaaaaagatatcgagaatctgggtggcacgatgcgtctgggtctgtatccttgtaagcttcaggaaggttctttggcgatggcttgttatgatgacgagctggtgtatgagagacaccgtcaccggtatgagttcaacaatgaataccgtgaaacgatcgaaaaagcaggactggttatctcgggtacatccccggatggacgtctggttgagatcgtggaacttccaggacacccatggttcctggcggtacaattccatccggaattcacttcccgtccgaaccgtccgcaaccattgttccgtgattttgtaaaagcttctctggtgaatgcgcagaagtaataaatttttttgtgttaacgtaatagatattggggatgttcctggcaaccatagcggatgccggaacatccttttttttgcgtagaaagcaggtggaaatgctttttgtcattttgtgaaggtagcaggattttaatggaagaggtagaatacttatcatgacgactatgggatagttatccagattcgaagatgtgcatgctttcctaattctaggaggttacagagtggaagataaaaaagttttgattgttgatgaccagaatggtattcgaatcctgttaatggaagtgttcagcagtgaggggtataacacgtttcaagcacccaacggcaaggttgctctggagattgtgaataatgataagcctgacctggtattgctcgatatgaagattcctgggatggacggtctggaaatcctgaagcatattaaagaaattgatccgggtatcaaggtgatcatgatgaccgcttatggtgaactggacatgattaaggaagccacggatctcggagcgctcatgcactttacgaaaccgtttgatatcgacgagatgcgagtggctgtgaatatgcaacttcgcaacggtaccgccaataaatgcagctgaatcctgttgatacaggatttttttgcgtgtggagaacatagaaggtacgtggtgggaaaatgaggtatttcactccttcatccggggaatattggaaatggggaagttataaagcggtgtctatgaaaactgtgctgcaaagcacagcatttttgcaaatgcttgtttagtatttgacatgggatgtggtataataagcccgtatgtgatttcggctaaaaaccatagacacaacccaaacccctaggaggattgaaaccatgccattagtatctatgacagacatgttgaacaaagcacttgaaggaaaatatgcagttggtcaatacaacatcaataaccttgagtggactcaagcgattcttggtgctgctgaagaagagaaatccccagtaatcttgggtgtatccgaaggcgcagcacgtcacattggtggcttctacactgtagttaaaatggtagaaggactcattcacgacatgaaaatcactgttccagttgcaattcacctggaccacggttcaagcttcgacaagtgtaaagaagcgatcgacgctggattcacatccgtaatgatcgacggttcccaccactctatcgatgagaacatcgaaatgactaaaaaagttgttgaatatgcacacgctaaaggcgtttctgtagaagctgaagtaggtactgtaggcggacaagaagacgacgttattggcggtatcatgtacgctgacctgaacgagtgtatccgtatcgttaaagaaacaggtattgatacattggcaccagctcttggttccgtacacggtccttaccatggcgagcctaacctgggcttcaaagaaatggaagaagttcgtgacgcggtacaagttccactcgtattgcacggtggtacaggtattcctaaacacgacatcgacaaagccatttccctgggtacgtccaaaatcaacgtaaacacagagaaccaaattgcttttgcaagagtggttcgtgaagtgcttgcagctaaaccagacgcttacgatccacgtacattcatcgtaccaggccgtgaagcaattaaagaaaccgttaaaggtaaaatccgcgagtttggttctaacaacaaagcgtaatttatctttaccagttccatactgtgaaatggaaaaacaccgcctagccggtgtctttccattttcacaccttatttctacatcggaagccaacagcacgtattgccgttcatcggctgcaaaacacgtagggggacattaagctttatggaaaaattgatgattagtggcggacgtccgttacagggaactgtaactataagcggcgccaagaacagcgccattgcgcttattcctgcagcattgcttgccgagtcagaagtcgtgttggacaacctgccgcttttgagtgacgtggcggtttatgcagaaattttggaggaactcggagcacatgtgacttgggaaggcagtcagatgaagattgacccttctgacatcaaatccattcctatgccgaatggtcccgtgaagaagcttcgtgcttcgtattatatgatgggtgcattgctagggcgtttcaaagaagcgaccataggtttaccagggggctgtaattttgagcctcgtccaattgatcaacatatcaaagggtttgaagcgcttggcgcaaccgtaacaaacgaacatggctccattcatttgcatgccaaagagctgcggggagcaaaaatctatcttgatgtaagcagtgtcggcgcaaccattaatatcatgctggcggctactcgtgccaaaggctctacaattatcgaaaacgcggctaaagagcctgagattatagatgtagcaacacttctgaattccatgggtgccagcatcaagggtgcaggtaccgaaacgatccgtattgaaggggtctcggagcttaaaggctgccgtcattccatcattccggaccgtatccaagcaggtacgtatatgatcgctgcagcggcaacgcgcggagatgttctgattgacaatgtgattcccaaacatctggaagctttaacggcaaagctgctagaaatgggtgttggcattgaagaattggatgaaagtatacgtgtcattggtaaaccaagctataaccatgtggacgtgaaggcacttgtatatcctggtttcccaacggatctacagtcacccatgaccagtgttttgacacaggcaaccggtgtgagcgtcctgagcgactttgtatacagtaatcgattcaagcatgtgcctgagttggtgcggatgggcgcaaagattcgagtagaaggacggtcagcaattattgaaggcagtgcattaaacgcggccaaagtaaaagcatccgatcttcgcgctggagcagcgctggtgattgcaggtctcaccgtcagtgaaggtgtgactgaagtaacgggggtcgaatatatcgaccgcggttatgatcatctggtgactaatctgcgcttgctcggtgcagatgtatggcgggaaactgattaactaggaagcattatgcatgattcagtcatacacatgtttattttaactgaactgcatatctttttgatgattaggtaaacctgttttaatagagttctcagtctctccggcataagacgaaatgtttctgtttcctttaccggagggtctttttttgaaataaacttcatatggctgtaagaacatcatttctcatccccaacccccggttttgtttgaactgcgctccatagccggtctatccggattgatcgcctcaatgcatcgttcactcaatagcggatattgccgaatgttggccatcccacccggaaacttacactcaaagacaagtatttgcattataacggttacattccgtacaatggacagaagggattgtggcagacgccgctctctatagccggaacatctagcgaaactatccatttcacacggacttattaattgaataggtggttattatatggatctacaaatttccgatttggaagaaatgaaactaacggacctctacaaactggccaaaaaatatcagataccgtactatggtacgttaaaaaagaaagaattaatctttgctatactgcgtgcacaagctgaacagagtggcctgatgttcatgcaaggcgtactcgagattttacctgaaggttacggatttcttcggccgatcaactacttgccaagtacggaagacatctacatctcagcttctcagattcgcaagtttgacctaagaacaggtgacctcgtatcaggtaagtgtagaacgcctaaggaaaacgagagatacttcggtttgttgcaagtcaacgctgtaaatggtgagaatccatcggcggctgcagagcgacttcacttcccggcactaaccccactgtatccgcagaaaaaactggttctcgaaacatcccccaaccatttgtccacacgaattatggatgtgctcgccccggtaggattgggacagcgcggattgatcgtagcacctcccaaagcgggtaaaacgcttctcctcaaagaaattgccaacagcatctcaactaacaatcctgaaattgaactgtttgtcctgttgattgatgaacgtccagaggaagtaacggatatgtcgcgttcggtaaaaggggaagttgtggcttcgacatttgatgaactgcctgagaatcatatcaaggtggcggaattggtgcttgagcgtgcgcttcgtctggttgaggccaaaaaagatgttgttatcctgctggatagcattacgcgtctcgcccgtgcatataacctggttattccaccatccggtcgtacacttagtggtggtattgatccagctgcgttccatcgtccgaaacgtttcttcggttctgcccggaatgtggaggaaggcggaagcttgacgatcctggcaacggcattaattgatacgggatcacgtatggatgacgtcatttatgaagagtttaagggtacaggtaacatggagctccatctggaccgtcgtctggcagagcgccgcatattcccggcgatcgacattcgtcgttcgggtacacgtcgtgaagaagtgttgctcagcaaggaagagttggatacaatctgggcaattcgtaaaaacatgaatgattcccatgactttgttgaaggattcctgaaaaaacttcgtaacagcaagacaaatgcagagtttttggcggcatttgattcggctggtaatagcccgacaagcaattcgggtacaacaacaactcgtcgctcacctagacagacagcaacgtcaggtacatcgacgtaagtgtcgttcgactaatcactttctttttgcagcattgctgtgaatgttacaatacactcgtcgttaggtttaacccattagatgtgaggagaacatcatgtatttagtatacgcagatgaaaaaggtaatgtatttgatcatccttccctgtacgggcttgcccgcagtggagatatgatcgttgagattatggaggatgagttgattcctctgccagaaggtgcaaccttggttggactcccgagtacccggcccattggtatggacccggataccggtgagatgttgccaatgccaacggacacacaggctgtaggtgctttgcttccacagggattcactcgtttgtgtctccctggatacgtgaagacggataaggagtataagttgcctttgttcggttattccgcagtagtctggaaagatggcggtttctatgtcaccgcttcgaaatcggatagtcctgaaaaatggaatccactcaactgtgatcgtgacgatgtgcgttccggggtcaaaagattgacggagcaataccccgagaaccgactttacacccatctatccaactgtgcgcttggatatgaatgtctaacttcatcaaacacgttcctgaatcgttgggaaggtggagtgccggtatcctattcttgcaatgcgggctgtttcgggtgtatctccgagcaaccggatgatagcggctttgtttccccgcagacacgtatgaacttccgaccacgtgtggatgagattgtggaggttatgctggaacacttgaagacgccggagtccatcattagttttggacaaggttgtgaaggggagccttccacacaggccaagctgattattgaagcgattcgcgaagtgcgttccgtaacggacatggggtatatcaacattaataccaatgccggtctgaatgatcacattagaggtattgtagatgctggattggatctgatgcgcgtaagtacaattagtgcactggatgaccattataacgcctactataaaccacgtggttataccttagccaatgttgagaagtcgatgaaatacgcagcgcagcagggtgtatacacgtccattaactatctgatcttcccaggtgtaacagatcgtgaagaagagattgaggcgatgattgagtttgcgagaagaaccgatctacgcttgattcagatgcgtaatctcaatattgatccagagagctatctggaattaattcctcctgctcaaggtgatatcttgggcatgaagcagatgattgagatttttgaagacgagttgcctgatgttgtgatcggatcgtacacccatgttccgccagctggaatggcacgtccaaaacggttgattacctcttaacaataaggattgcaacaggcacaaggtcgtgttataatctcagggttgtgccatttactctgggtccgcttgaggctcagggcggaaagaggtgaaaggtaatgaaagaagcaattcatcctaattacacgattggtcaagtatcttgcgcttgcgggaatacttttgagacaggttcggttaaagacggacttcgtgtagagatttgctccgcgtgccacccgttcttcacaggtaaacagaagtttatcgatgctggcggccgtgttgatcgtttcaaaaagaaatacggaatctaattggacaattcttggagttgtctgctaattgcatccaacacacccctgctgatctggcaggggtttttatatgttatatgttaagcataatcgcattcacgttcctctggttgcaatttggataaccttacgttatactatttcttaccgtgctagatggggaggtagcggtgccctgtaactcgcaatccgctatagcgaggttgaattcctgctagaggttttgccgatgtgaggtttggtccctaaacgtggtgttgacggttgggtcctccgcaatgagtactcatgaacctggtcaggtccggaaggaagcagccataagtgagatcactcttgtgccggagggttgcctagcccgagctattgttcaggggtgccacttggatcgcaaatatcgatagcaggtgcacggcttaccttttaaatgtagagacctttgcagttgtatgtatgcagaggtctttttgatatgtcttaataaaccacgcatgaatgagtcagataaagtttggattcaccctagaatatagtataataggggaacgacaaaggactcgaatgcgaagtggaaggaaggtaacgcatcatggagcatatcgcgttataccgggcttggcgtccccagtcgtttcaagatatggtggggcaacagcatattattcagaccttgcagaacgcgattcgtgaacagcggacttcccatgcctacttatttagcgggcccagaggaacgggaaagacaagtgccgccaagattttggccaaagctgtgaactgcgaacgtgggcctgcgcctgaaccttgtaacgagtgtgaagcttgccgcagaattacgactggcgctgtgatggatgtgcaagagattgatgctgcatccaatcggggcgttgaagaaatccgtgatcttcgggaaaaggttaaatatgcgccaaccgaagtccggcagaaagtctatattattgatgaagtgcacatgctgacaacggaggcattcaatgctttgcttaaaacattggaagagccaccaccacatgtgatgtttattttggcaacaacggaaccgcaccgccttccggctaccattatatcgcgctgtcagcgatttgattttcgtcgggtgtccctggaagagcagacagcgagacttacactgatctgtgaacaggaaggcatggaagctgaccaggatgcgctccaatacattgcccgtttatcggacggtggaatgagggatgcacttagtgtgctggatcagatctcttcatttacggatggacgagtaacgtaccagcaggttatggacatgacgggtggaattgcttcagagcaatttgccaaactggctgcttcgctgctcaaaggtgatgttggtcatattttgcagatgattgaaggtttcatgcatgaaggaaagagtgcagacaagtgcatggagaatttactgtattatttccgtgatttgcttatgattaagatggtacctgatgcagataaactgacggaccgggtacttaatccggagtctttccgtgatatggcggagtcattcaccaaggaacaactgttccacatgattgacacccttaatcggtaccagagtgaaatgaaatatgcagtacaaccacagacattatttgaagttgcattgcttaaactgtgtagtattccagctcaaggtgaggcttctgttcaggtgggagcttcagctcatgcagcacctgctgatgggggagagatcaaccgcttgaagcagcagcttgctgagttggagaagaagttggatcgtgcactgaaaagtggtttgtctggtggagaaggttcatcgagtgctccatctcgcccggcaacaagagcgccggtatcgagaggcaattcacctgcgaagcttcctgcacagttggatcagtatgttgcgcgcaagggagcccctgagttcgcagagatcagcaaaaaatggagtcagatcctgcaacgagtgaaggaagagcgggttaccgttcacgcctggtttgtggatggtgagccggtatcattgcttgaagacaatgtattggttgcttttaaaaacaatattcaccgtgaaacgacggagaagcaggctaaccgcgaagtcattgagcgggtgttgtcggaacatcttgggcgttcggcacgattggtgacgatgatgctcaaagattggaccggagcaatggagggagcttctgaagcgccaaaggaggactttaagcttgaacctgagcatgaagacggcggttcaggcaacaaacagccttggattgatgaagccatccagctctttggtgaggatcttgtagtgatcaaagaataatgcgcatagcgcgataaccataacaaaggagatgaacaattatgaacaacatgaaccaaatgatgaaacaagtgaagaaaatgcaggagcaaatgctgaaagcacaagaggaactggcggacaaaacagtccaaggtacttctggtggcggtgtagtgacggctgaagttaacggacacaagaaattgcttgctatcacgatcaaacctgaagcggtagatccggaagatgttgaaatgttgcaggatctcgttatgacagctgttaatgatgctatggccaaagccgatgagattgccaacaaggatatgggcaagttcacaggcggcatgaatattccgggattattttaattaaaaaattgatcctgtcaaaggagacacaatcgattgtattatcccgaaccaatagccaagctgattgatgccttcacccggttgccgggtgtgggtcccaagacggcagcgcgtttagcttttcatgtgcttaacatgaaggaagatgacgttatcgattttgccaaagcgctcgtaagtgtgaagcgtaatctgcattactgttctgtatgttgtaatatcactgatacggacccgtgtcgcatctgtcaggataagtccagggatgtatctgtaatctgtgtagttcaggattcgaaagatctggtggccatggagcgcaccaaggaattcgatgggtactatcatgtgttacagggcgcgatttcacctatggagggaattggcccagacgatattcgtttgaaggaactcctggttcgattaagtgatgaacgtataaaagagatcatcttggcaacgaaccccaacattgagggtgaggctacagcgatgtatatctcccggttggtgcgtccgtttgagatcagtgtgactcgtattgcgcatggattgcctgtaggtggcgatcttgagtatgcggatgaagtgaccctttccaaagcgttggaagggcgcagggagatgcgttagtgtgattaatttgtattacgcagcggactttccttagagacttcgaatgctaaataagtttcgatgtgcaaagagagccttagggctctcttttttttgtgaagaaaatgaatgcccgagttctaagtttgtcctttccctgataagtatgagagtatgctgtgctgatcaggagggggagagtttatgtttttgtggcgaaatacacggaactcggtagagaaacacaacagaatgttgaaggaacttgaggcggatcagatctatgcagatattcagatggctaagcaggagtgggaacgggctatgagacagtttgaagatgcacaggggcaggatgagattgattatgccatttatgtattggaggcagctgagcggaagtaccagatccacttgagaagagcaaagcgagccagagctaatgatgatgttacatcacagcgaggggttagtatgtagagtcacgtatacattaaacacggaggtgtaacatatgaagagtatcatactgggaagtgtattggttatatcattacttgggcttatcgttattttattcagaaagcggatagggttatcgtttttcacgtcatttggaattcatctggtgctggctgcagtagggatatatatcgtgaattattccggctggattacagggacctacatcccgctgaaccctgcaacgatagggactgtaactgttttgggattgccaggtgtggggctattattagggttgaaaatttctttgttcggatagttgactcgcaggatatttatatggtacattatatctcgttgctttgcttgcttggttagatgctttagatgaaatgaaggagttcattacgaacttcgaaaaagaatttcaaaaaaatacttgaccaaaacaaacgaagtatgatatattataaaagtcgccgctgagagaaaatggtgacgaaaaaaacg

SEQ ID NO: 21 - DNA, 32774 bp, Paenibacillus xylanexedens
  source 1..32774: mol_type = genomic DNA
gcgcccttagctcagctggatagagcgtttgactacgaatcaaaaggccgggagttcgaatctctcagggcgcgccattataacttcatattttgccggcgtggcggaatggcagacgcgctcgactcaaaatcgagtgggaaaccgtggaggttcgagtcctctcgccggtatagataacgggatgtagctcagcttggtagagcacctggtttgggaccagggggtcgcatgttcaaatcgtgtcatcccgattgttgttatgcgggtgtagttcaatggtagaactttagccttccaagctaatagcgtgggttcgattcccatcacccgcttatatattgcaaaagaaagagacggtactcaccgtctctttcttttttttgcattcacaggcatattgatcataattgtatgcaaagatcacggattatatggctttagcgtgtatcccatcctcaccatggattcccccctcatttaagtctgtccttagtcattgtggaagtgttcaaatagagaaggtctaacacatgttcgaacacaagaatatcttttctttatcacaatttataaaaacgcttacaaaaatagcttgcgtaaatcattaacctgtaataccatatcaattaagcgcttaacctttaggggtaaggcgcttaaacttaacgtagattaagcgcttaacccgtaaaggaaaggacggcgatcaattcatgaatacaattcgactaacgatggctcaggcactgcttcgatacctggatcagcaatatatctcggttgacggggtggaaaccaagtttgtgaagggaatcatcggtatttttggacatggcaatgtaacaggcattggagaagcgctggagcgcagtccgggaagcctggcgtatatgcaaggcaagaacgaacaaggcatggtgcatacggcagcggcttatgccaagcagaagaaccgtagacagatctatgcatgtactacatccattggacctggtgctttgaatatgattacagcggcagctaccgcaacggtgaaccggattccggttttattgcttccaggagataactttgctacacgggaaccagacccggtacttcagcagttggaagtgagcagtgattatacaatctcagccactgatccattcaaagccgtcagtaaatactgggatcgcatcgttcgtcccgaacagttgatgattgctgttacacaggccatgcgtgtgctaaccgatccagcagagacgggagcagtaacgctcgcactgccgcaggatgtgcaggcagaggcgtacgattatccagaatcgttctttgcccgaaaagtacattatctggatcgtcgtcccccggtacaggcagccattgagcgggcaacggagcagattgcccgaggcagaaagccgctgctcgttgcaggcggcggtgtgttgtactctgaggcatccgcccagctcgtggaattcgccgaggcatttggtattccgatcgccgagacgcaggcgggcaagagcacagtttcttgggaccacccactaaatgtgggggcaatcggggttaccggctctctggcagccaataggctggcgagagaagcagacgtggtgatcggcgttggtacgcggttctcggatttcacgacggcgtcccgctctgcttttcaacatccggaagcgtcattcatcaacatcaacctgaacagtatggatgccgccaagttaggcggagaagccattctggcagatgctcgcgaaggattgcaggctttgcagaaggaattgcaggaaagacaataccgaagtgcatatggcgcatctgaagttgctgatctccgcgctgagtggaatgcagaagtggatcggctgtatgcagctcaacatgaagcagggctggcacagactaccgcagtcggcgttgttaaccggacgattgatccatcctccgtcattgtgtgtgcggcaggtagtctgccaggtgatctacatcgtctgtggcgtgcgtctgaaccaaagacataccacatggagtatgggttctcctgtatggggtacgaggtaagtggagcgttcggagcagcacttgccgagccggatcgggaagtgtacgccatggtaggagatggcagttatctgatgctgcattcggagtttgtgaccagtttgcaggaacagaagaagatgactgtcctattattcaacaacaatggattccagtgtattcataatttgcagcgggaacacggtagtgacgggttcggcaatgagttccgttatcgggaatccgagagtggacgactgaccggggattacatgccaatggactttgctgcacacgcccgaagcatgggagccaaatcctatagagcggagacagcagaacagctggaacaagcactccgagatgcgaagaacgaaacagtgagtacgttgattgagattccggtcttgcctggaaccaacgcaggtggatacgagtcatggtggaatgtgggtgtacctgaggtatctgccgaagaaaaggtagttcatgctcatcacacgatgcaagccaaccgtgccaaagcaagaccgatttaatccggtttaatatagtgaaccacaatgttgaacgacaaaggagacgtggagcaatgagcaagctgccatttcagcttgggattcatccgatcaattgggtcggtgaagatgtgaaagagcatggtgatgcgacaacgtgtgcacagattctggatgacattcagcgtcttgggctgagaggtacagagatgggacgtaaatatccgactgaccctgctatattgcgtgaggaattgagcaaaaggaatatcaagttggtctctcagtggaaatcggtactgttctccgatctggcgtatcgtcagtcggagctggacagttatcgcagacatgcggagtttctgcaatccatgggcagtaaggtgatcagtacggcggaggtaggcgggtcacttcattttgatccaagacgaactccgaatgaaaaagaagtgctcagactcagcgaatctgaatggcatattcttgctgaagggttgaacgaagcaggagctattgctcgcgaacatgggttgaagcttacgtaccatcatcatggaggcacagtggtagagcaaccggatgagattgatcgactgatggagctgacagacccttctctcgtgtatctgctctatgatactggtcatgcctactatggcggagccgatccacttgaactgctacgcaaacattatgatcggatcgcctatatccatctgaaagatatccgcccgcatgtgctggatgaagcacgcgcggagcagtctgactttgtcggttgtattcgtagaggagtgttcaccgtaccaggagatggatgcattgattttgcaccaattctgcaagaactgatcacacgagggtacgatggctgggcgatgcttgaaggagagcaggaccctgcgattcataacccgtacgagtatgccaaacgctccttgaactatatggagtccttataccaacacagctgatttgttcagcattgcagcggtcagaggccaaacccatgaagtgaaaaggaagaaggctagcaagagtataacgttacgattggaaattaaactgacctattctagccgtttactaatcctcacgaggaatgaatatacagtctagatatccatatacaacatgtaaaatcccaccacagaaaggggctcacatgcaatgacttacgtatcctttcccgtatccaggaagaaggatttcaccgcgattggccgtttatgtatcgacttgaatgccaatgagatcaatcgcccgatggaagagacgatgacgttcacgaaatatgtgggtggctctcccgccaatattacgattggcatgtccagactgggtatggagacggcttttatcggtaagatcgccaacgaccaaatgggcagattcatccatagctacttggagaagaacggcatcgacacatcgaatgtggtaacggacgacaccggagcggtgacggggcttgcttttaccgaaatcaagagcccaaccgattgcagtatcctgatgtaccgggacaatgtagcggatttgttattacaggcgcaagaggtacaagagcagttgattgctgactccaaagtgctgctaatctcaggcacagccctcgcgcagagcccatcccgtgaagccgtattacaggcactaacgtatgcaaaaaaacatggcacagttattgtgtttgatctggactatcgcccatacacatggacatcagatgaagagacagcggtctattacaaccttgcagccgagaaatgcgatatcatcctcggcacacgtgaagagttcgacatgatggagacattcgatcacaatccggatcatagcgatcaggtgactgcgcagaaatggtttgatttctcagcgaatatcgttgtaatcaaacacggcaaggaagggtccattgcttatacgcgtgaagggctttcccaccgcgctgacagctatccggcaaaagtggtaaaaacgttcggtgcaggcgactcctatgcggctgggttcctgtatggattgatgcagggctggacaattgagcgcagtatggcgtatggcagtggcgcagcaagtatcgttatttcaagccacagctgttcggatgcaatgccaacggtcgaacaggtaaatgactacattgaacgttgcaatcggggcgagatcaccgtgtcttgaagctcgttgcaatactttgaataacacactcatacagatcaacatcaatcatataagttcaacataagggatcacacataagtgaagggagacagggctatgggaaaaggaatttctgaagcgtctgcaacagcgacaatggtacaaaactggatcggaggtgcctgggtaaccccagcgtcaactcgcacggagccagtggtgaatccggctacagaagaggttattgcacatgtgccattgtccgaacaagcggacgtggatctggcggttcagacagcacgagaagcgttcaaatcctggagcagcacaccggttccacgccgtgcacgtattctgttccgctaccagcagttgctggttgaacattgggaggagctcgctcgcctggtgacactggagaacggtaaaagttatgccgaagcgtatggcgaggtattgcgtggcattgaatgcgtcgagttcgcggctggtgccccgaatctgatgatgggcaaacaactgcctgacatcgctacaggactggagtcgggcatgtaccgctacccaatcggtgtaattggggggattaccccattcaacttcccgatgatggtgccgtgctggatgttcccgctggctattgcgtgtggtaacacctttgtcttgaagccgtccgagcgcacaccgctgctggcaggccgcctggcagagctgttcaaggaagcggggcttcctgacggcgtgctcaacatcgttcacggtgcgcatgatgtcgtgaacgggttgctggaacataaggatgttcaagcgatctcctttgtcggatcacaacctgtggctgaatacgtctacactactgcatccaagcatggcaaacgggtacaggcactggctggtgccaaaaaccactccatcgttatgccggacgccgatctggatctaaccgtgaaagagattaccagtgcagcctttggttcagcaggggagcgttgcatggcatgtgcggttgttgtggctgtgggtgatgtggctgacgaactggtacaaaagctggtggaagcggcagaccgtattaccattggtaacggcatggatgagggcgtgttcctcggtcctgtcatccgtggaccacataaagagcgtacactcagttacattgaagccggagagcaggaaggcgcggcattgattcgggatggacgtaaggatcaggcgacaggtgaatccggttattttgtagggcctacggtattcgaccaagttgatagcaatatgaaaatttggcaggatgagatctttgctccggtactctcggtggcaagagtgtctacgctggaggaagccgttgagctggcgaaccgttccgactttgccaacggggcgtgtctgttcacccgcagcggagcgagtatgcgtcaattccgtgaaacgattgatgcgggcatgttgggtattaacctgggcgtacctgcaccaatggcattcttcccgttttccggttggaaaaagtccttctatggtgatctacatgccaatggtacggatggtgttgaattctacactcgcaagaagatggtaacggcgcgctggtaacaaccagagcatcactcgggctaaggggaacgcccagcccatatggacgcacatagggaggataacggaatgggcaaggacaaagtgagaattggcatcatcggtgctggacggatcggcaaaattcatgcagacaatctcctgcgtaacccgcatgccgagattgtgggaatcagtgacttgtttgcaggtcctgaattggaggcttgggcctccagtcgtggcatccctgttgtaacaacgaacagcagcgagttgatctcgatgcctaatgtagacgcggtgctgatctgttcttcaacagatacacatgtgccgctgatcgaacaggccgcccaggcgggcaaacatatcttctgcgagaagccggtcagcatggatctggcacagacccaagcggctgtagcggcagttcagaaggctggcgtgaagctgcaaattggatttaaccgccgcttcgatcacaacttcagacggatacgtgcgcatgtgcaggatggtacgattggtgatccacatattatcaaaattacgtctcgcgacccgagtccgcctcctgcggagtatatccgggtgtctggcgggattttcatggacatgatgatccacgactttgacatggctcggtatctgtccgggagtgaagtggaagaagtatacgctcagggtaacgtgctgatcaatccggtttttgcggaacatggtgacgtggatacagcgattgtaacgatgacgtttgccaatggagcgattggtgtcattgataacagccgtcaggcagtatacggatacgatcagcgtgttgaagtatttggctcgaagggcagcgccgcagcggcgaatgatcatccaaatacggctgagatcagtacagcggccgggcttatgcgcgacaaaccgttacactttttcctggaacgctacaatgaagcatatgtacaggagacagccctctttatcgatgcaatcattcatgatacaccggttatcgttgatggccacgatgcagtacaggcagaacgaattgcactggcagcaaaaatgtccatggagcggggaagacctgtgaagctgagtgaagttcctgggatgtcactggaatcgcaaacggcaacgccatagtggatgattaaagtcacttttttctaatagagcgcaagaatggtccaagtttttgttttttataagtatcaggttgttgtggacgattacagaaaggagtggatgacaagatgtcagaacgtattgtgaaacccgtggtcaacccggagggagacggtacacttataaacgtaacaccggagtcggcggggtgggaatatgttggctttcaggtagcgaagctggcggagggggagacgctaacccgtgagagcggtgatcaggaactctgtgtggtgcttctcagtggtttcgccaatgtaagtacccgggagcacacatgggataatatcggaaaaagaatgagtgttttcgagaaaattccgccgtattcggtctacgtctcaacttccgatcaagtgcagatcacagcacgtaccgaactggaaatcgctatatgtgttgcacccggtaaaggcacgtacccggctcgtctcattgcacccgaagatgtaggggtagaggcacgaggatatggcaatctggaacgccagattcacaacattttgccggaacaaaaagaagcggacagtctgctcgttgttgaggtattcacaccagatgggcattggtccagttacccgccacataagcatgatcgagacgcactcccggatgaatctttgctggaagaaacgtattatttccgtgtacagcctgagcaggggtttgccattcagcgtatatacacggatgatcgttctgtggacgagacgctagcagtgaagaacggagaagtggtgcttgttccggacggatatcatccggtaggcgctcctccggggtatgaggtctactatctgaacgtgatggctggaccaacccgtacctggaaattccataacgatcctgaccatgagtggttgatgaaaaagtaaaacagttcatgctacgcacattgtgctggcttcaagttgcgtatgcagacttccccctgcataatgagaagagaacaattatctatgtataacgaaacttatatatagcacaaatggggaacaacaatgaaagcaaccatatacgatatagcacgcgaggcgggtgtatccattgcaaccgtctcgcaggtcattaatggcaaaggcaagatcagcgagaagcggcgcgctgagattatggagatcatggaacgccttcattatcaacccagtgcgatcgcagctgcacttacagggaagcagacgtatacattggggctgctcgtaccggacatctcaaacccgtatttcgcagaactcgcaagagccgtggaggatcgaagccgacaattgggttatagcgtggtcatctgcagtacggataataaggacgagcgggtagagcgttacctgaatctgcttcagcaaaaaagggtcgatggcatgatgatcggaaccgggatcgataatgccgaaattttgtcaccacttttgcagcagtccatccctgtcgctttgattgcacgtcatatgccatccctgtcggttcatacagtcaccattgacgacataattggcggagcactcgcagcggagcatttgcttgaactggggcacacccgtgtagcggttctgtcggaaccgtccaaagtcagcagcagtcaggaacgtgtacgtggattccgtgaaaccttgattaaggcaggtcatacgctggaaccgaatcagatccgagaatcggcagctgacctgagctcagccaaaaaagaggcgctactgctgctcggtgagaaggatcacccgacaggtttgttctgttgtaatgacattcaggccattggtgcacttcaggcagccaaagagctgggcctacgggtgccagaggatgtgtcgattatcggatttgataatacgattctggcttcggtgacgagtccgccgcttacaaccgttgcccagccaattgaagaactgggacatcgcgctgtagatctgttaattgaagaattaaaggataagcgtaaagaaccgcagaagattgtgctgaaacctgagctggttatccgagaatcagcaggtcatgtattgggctgaaaacaattaggtttctgatgtaacctgatcagttgtgaggccaagcctacgtgtgtcatattcttttatgcagatacggggccgcttcatcccttattccgaatatgtaacgtatcaacataacaaacaagccgcattcaccctatgggagaacgcggcttgttgatttatatcttgaactttttcacttcttcagcgagcgtattagcttgttgagccagttcattggagcgttccgagatactcgtgatataattgaactgttcttgcgttgaagaggcaacctcttcggtggaagcggcgctctgttcggacatggccgcaacactagagatcacttcagcaatcttgccagaactgttatccaattcggttgttgcagacgatacttgttgaagctgagtgtcaatgccttcaatagattgcttgattcgcataaatgagttgcgcatctcatgtacggcagcaacctgttgctcaataccatgttcagcagaatcgacctcgctcacgctttggtggctagccgcctggatttcattcagcaacacgatgatgtcctgagcagagccggcggattgttcagccagtttgcgcacttcctcggcaaccaccgcaaatccaagtccatgttcacccgctctggcggcttcaatcgaagcgttcagtgcgagcaggttagtctgggaggcaataccttgaatcatgctgacgatgctttcaatcttctgtgatttgtctgcgagtagattgattgattcacccacacggtcaatcgagtggcggttaccatccgaaagctccacctgatgatctaccgcttgtagcccagctagcatggcttctcctgcctcacgcatcatcgttacggactgctcgacactgcgattgataccaccaacactatcactcatctccgacagacggcttgagccatcatacacggattcagcctgtgtactggaaccttgagcgagttcatcagtggcaatggagatctgctcagcgatgcgtttggttttatctgtatgctcctgcatctcacccgagatactttgtacgcgatcagcagaagccgttacttgcctaaacagcgagctaagctgatcggacatctgattgaatgccatacctagttcagcgaattcatctttgcctttgatctgcacccttcctgtaaaatcaccactcgacatttggtgggaggtctcatgtagatttctcagtggcttgatgaagagtgttgcgatccaataggcacctgccagtacaactaataatgtaatggcgataatgagaatgtagttattgcgcaattcataatagtccgcataggcgagtttctcagatatgactgatccgataatccaaccagtacttggaatttgtttgaagtagaggagcagattttctccgttatattggaatgatctttgtcctgaaggatgcgtttgcatctctgcaagcaacggtcccaattgatcgttgtctgcggctgaagtacttgcaagatcagcctcgggatgagctaaaataactccctttttgtcgagcataaaagtgtagcctagtccatccaggttaatttggttgactgtatcggttaacttggaaagtagaatatcagaagcaaccactccccgtattgcaccgttttctgtctttactggcatggcgatagacaccgtaaattgtttggatttgttgtcgatgtaagggtcagtaaaaatcagcttgtctgcttgtagagcctctttataccaagaacgatccctgggatcataatctttatctgggacgaagtcagaaccatttataaactgtccttccttgtttccgtaaaatatgtcctctaagttgttaggattggtgcccttatacatgatggacagataatcttcattaagatcagaagatgaaacagcctcctgaattacaaggcctagtgtttccactaatttctcgtttccgtgtaaccagccgtccaactgaaatgttgcggtagatattaatccttctagtttgttgttcacactctgagaagcttggttttccgtctgaaccaaaccaagtggtgcgagcgcgcctgctgtaagcagaacagtgacgaagaaggttaacatcaatttgagttttaacttcatacttttccccctagatgtcatgaatgtgttagtatgtttgaagcttattatatatatcgtcaaataatatttaatccttaggcgagaccaaatggtaaaatgcggaagaataacgaacacaaaacgagttttatttgatatataatatgtaaggcctcaatttctaggaggaggttagactgtgaaaaacagaatcaagatgattataggtatcgtcacgattattgttgtcgtagctattgcagtgcgtatgtatacctctggtcaatatactaactatatccccagcaaacatacgacgtttcgagcagaggttacagatcatatgagcatgctggatcgattggatcgactgacgattaggaagatttcaagtgcagattcgtataatgaagatgatgaagtgacgattacagatcccaatgagattagagacatgctgaagctattaaaggatattgatcttaaaagagtacgggaattcgacgtttccgaaaggaatccggattactatgagtggcgactcaccattaataaagaaggtcgctttaccgatggatttggactgacgttttataatgaaaagtccatctcaatctacagcgaggcaaaaacgagagacaaatttgaggactacgagattaccaatgagtttaatctgaatgagatggaccgcctttttgaaaagctgaaggaggagcaaacttgaccatcatatccaactattatgtacgccctattgaagaacaggatattcctttcctgtgggagatgttatacgcatccctgcatagaagagaaggcgatgaaccttttccaatcggaagtattcatactcccggactgtccaaatacgttgaagattggggaagagaaggggacttcgggtatgttgcagttgaccagcagggcaagagactaggttcaataacattaagattctatacggatcagaatgcgggatacggttatgtgaatgcagctacgccagagatggggatggctgtaacggaagatgcacgaggaaaaggaataggtaccttactgcttcagtccgcattagatgaggttgaacggcggggaattgcagcagtctcgctcagtgttgacccggataaccaagcgattcgcatatataggcggttaggattcgtagaggagtgcctaaatggtacatcggtaacgatggtgcgtgtaagtaaacttgaatcttaaatgatgagcggtcgtatcactggcaaaactgagtaagccacgtggaactgcaaaagaaaaggcgcttcctcatggggaacgcctctttctgtgtgccatgtacagcatcagtagctctcttatacttagtccgtagcacttcaatattatttcaacaaaaattccaaagcctcgtcatacgtttcccattggaattcagtctggtgcgccgattctttggaaatccgattcaattgcattttggcgatcgcaccacctacggctacactggctcgctgcatcccccactgtgtcagtagtttctggtgttccacaattttttctttggtatcctgagggaaagccttcatgttccgcatatcgactagcacatcaaacgaatttcccaattgttccgctattctctggatttctgtattcgcttgttcgacattttcaggagaaacaatgccttcccagataatttcaataataggtttagttgaatccaaacgtctaacagacatgtaggcaactcctcgataataaaataatatgtaatatatgagactataagcctattaattatacctttttatagcgagaatgaaaactgaattcacaatatagtggttcttatggactactttttcctagggaagttaaattcagggattgttatcatatcgtcattgcgaggaaggttaaatagctaaaagccgcccagaggttgaactccagacggcttctacaactgtgacacgataaagttaagataactacttaaattagaagccaatcttcaaactgttaccttccgttgctacacctttggaaagggaaatgctcagcttttgttctgccgagaaaccaagtgtttccccgtcatgcagtgtgacgtcgttctcaaccacatacattgtggtcatgaacatcatctcaaatacatcgcttaaggactccgacgattgcataatctccatctcttctttaccaaagttacgtagtccgtaagtgtaagctgaagcgccttcggcattttggaataatccgatgaaaatccagagcgagactggcaactcatcatgtttgatcccacggctggtttcaacatattgactggcttcaacaacaagtggggccatgtatatggccagtgcgtgatccaactgtaacaaggcactcgctgtttgagtgaacagaacatgtccatcaatagcatttgttgcgttcagaacagagacaataatctgagactggtgccgtgaggtaacttgctccgcttctcgccaaaggatgttgagtttggcattcttctcaacttcacggtcaggcacaggcgcaggaatgtgggcacacaccacttgcattccattcacttcgaaaaagagattgccctcctctgggcgttcttcaatctcgatatcccattcgttcttcatgttcctgatgaagaggtcaaaatcacaatcgtcacgctccagcaggacaaaacccacgatggtttcactgtaattcgttgattcgacagcaccacctgcaggtactttctcctttttgcgccgccgaagcttgtcaaacaatcccatgacatgttctccttccaattccagaacgattctggtcattgtacactgctatctattcactaccttaccataaaggagttaacatgaatcgaagcaatgcaccattcgacagaaattacaggaacagaacgagcaacaacgcaatgatcgcaggcaaaccttgtttgataatgatggaacgtgaagaagtagcccctccatagagagctgcgataattacacacgccaggaagaaaatctgaatatgctgtccaacggcagcatccggatatacgagtccccagatcagacctgccgcaagaaatccattgtaaagaccttgattggccgcgagagatttggtggatttggcgaattccggcgtgagattaaaggttttcattgtgcgtggacgagtccacataaacatctccatcaccatgatatagaagtgttcgacagctacaagagctacaaaaatgatactaatcaaaggaaacaccttgctttctgatatgtaatttatttacttgtccatcctagtataaatgtttgcaacaagaacggaaagagtgaatttaatttgtaacaatttaattgcgtattattaaaattttttatcgttttccagttgagttatgatgttgaaattaaaaaatggttacaaaggtaagcatacgccgattgtcgacaatccattcattgggtaataatgaacaataaagaagtaatattgctcaggaaagggaggagattactatgggaacagttcaattcgtcatgttggctgatgatccatccacatttgtgacccgagttgtaccttttatcgacattgagcttgcaggaattccgggtgaccgtcattatggtctgcttcgtccggcggactcacgtcagaaaatctacaagcgtggcacaccgattgcgaatcgccgccagatcagtattgtgtctgaggaagaatgtgctcttattgctgagaaaatgaacattcctgaagtgcgtccagagtggcttggtgccaatatactggttcgtggcattgatcgattgacggaactgcctgctggaacgcggctcctatttccaaacgggacagggttaatatgcgaaggggagaaccttccttgtgtacatccgggaaaaatgattgaacaattctatgaacaggacggtttgcgcaaaaaattcgtgcctgcggctcgcaaaaaacgtgggattgtatgctcggttgaacgggaaggtgtaattcacacgggggataccatagaagtcattcgcctgtcctgattttcaggacaggtttctaattgatcagccctcggcgctcaccatgcggatgtttagagtgtaggtactcctctggtgtactgccaataatggacttgaaatctcggatgaaatgggattgatcatgatatccaagatcctgagatagcttaatcaggtcacagtgaagaccgcggtccatccattctgcagcattttgcagacgatacaacttgattaccgttttgggtccgatacccacatactgattgaacagccgttgaagctttcgggtatgcatattccaataagaagacagatcatccactctcagcatctctcggttctgttcaatctgttgcacaatatcatgaaccattctcgcttgagcatcttcagcaggaaggtgtgcacacaatagctggtcgatgtaactggttttatccgcatcatcccccgccccaagaagccggtcttccaaggactccgctgtgacgtcaagaatattggatacattcatcggttgtccgtacaatgaagaaacaggaacccgaaggaagggataaaatcctcctggtttgaacttcacgccaaatacacgacctttcccgctcacaagataggagaatttacgtcccgatggtccgaagaaaaacgtattgttccgttccacaaccagattgacacaggggttaggcacgacatgttggggatacggttcaagtccagtcagatcccacgatacgatccagtaatgtttaacaaaagggcgaagtgcttcggaaggagcatggcgtgtcagttgatatttatgatcaccttcattcagattcagcaggcccatacttggtctgtctccttgttctacctgttgcatccgaatcatccctcctgctcatctcacattatttaggttctctgaacaacaatgcccgcacagcaaaacggggtaaaatgagttgcctgcgccatctcgaaggttgactgaggaggcgatagagccattccaggttaagcttctgccatatcgcaggggcacgtttggttttgccagccacgatatcgagactgcctccaacacctatggctacacgagcgttcaactggtggcgatacttgttaatccagtgttccgcatggggtgcgccaagagccacgataagaaagtctggttgagcagtacaaatctcttccacaatctgttgttcctcatctgcctggaaataaccatggtgtctaccttttacgataactccggggtaacgctgcgcaatgatctttactgcctgttcactgacgctttcctctgctcccagcatgtagaatgaccagtgtttttgatcgccttcctccaataaacgaaacagcagatcacaaccggttacccgttcggtcaattgtccgccccgaaaacgggataccatcacaataccggcaccgtcagctgtgaccaacccggcttgatcaacgactttgcgaagagaggcattcttttgacaggacataacaatttcgggattacctgtgatgacatggaagagttcattgctttcctgatctacgactttatcaaggatcgcaacggtttgatccatcgttacattgggaaaagggatgcccataatattcgttgattggctcatatctcatttcctttctgattccatcccatgagtgaatggggaacaagcttatgcatgtgaagttcatgtatcatactgtcaatcagattatcgaatgcatgtacgtttggatcatagtcgtgtaacagatacagtttgcccgaacggccaatggctgtgactgcggaatagtagtatccggttaatccaagacaataacaatcttcattagcgtatttcaagatcgaatgcatctctgtggaacaacgtagtgtctcttcagcattcggaataaaatgaacttcatattcatgccaggggctttcagccagcacttccccggagatgtggctatagtatttaaaatatataatttcatctattccccaaaactcttctagaaacgatcgggcagccggaaataaatctgcggatgtagggcactgctctatgtatgccgagatgtcaacgcatcggttctcataccaacccgctttctgcagcaactgaatcatttgttgatagggtaacaatgaggattgtgacgttccagtcatattgaacaactcctgttatttcattccagtttagtatatctgatcttctgggaaagcactatatgggcgcaatccatttggattatggtattacacattcccgaaaaataaagagcttatattttacctgttgtcgcgtttttacaatacggcctttggggtataacgataggataggagtgcgaggttggcagatcgcttatccaatacataaagggagtgagtccatggaactgaaatatgaattctatatcaatgcaggactggaagatgtgtggaatgctctaatatcaccagacggcacacggaacagctttttcggtagcgaacttcgcaccaatttccaaccaggccagccgtttgcttatgtagggccgggcaatgatggtgcggagactgtccatgtgtatggagatatattggaatttgaaccgttgtccagacttagttatcaggagcatcctggaccgtcgtaccatgcgaatcatgccgagcttcaatccagagtggtcttccaattggaaactgtaggtgagtgtacgaagctgacgctgatcaatgatcaatttacaaataaccatccttccattgcgaatgcacagagcagctggtggatgattctaagcagcatcaaaacttgggtggagacggggaaaacactgaattttggctggtagctggtaagaggcagtcatttaagatttattttcataaaaaataaaggcaaataatataagaaccagtgctgtttcagcgctggttcttgtttttatataaaattaagaccattgctctacacttaatgtctgataatgtcgaaatatatatcatatgagctaagaggagaaatgagcatgtttcgtaaacgtactgaatcgaccaaaccacttcgtacagatactcatcagagattattggagtatagtcgtaaactggtagcaaacgcagaaaagggcaactatgacgcatggatcgaagatggtattgagtttcaggatactgatgaaatagctagtaatatcaaaaaagcagtacatatgatgaaagcacaaaacgaagccgtggaaatgcgccttagaatgctgaatcaggcgatgaatgtgggattatgggaatctgaaattgttgccggtgatccactggataacaataatatcgtcgcattttcgaatgaattccgccaaatgttaggcttccataatgccaaggattatcccgattcatttgcaagctgggccaaatcgatatatccggatgacagacctcaactggtgcaggagattatgaaacatgtgaatgacacaaaagcaacaactgcctataacgtcatcagccgtatgattacaaaaagtggagaaattcgctggttccgatgccttggacaagtcatccgaaatcaggctggagttccggtcaaactcctgggcatcatgtttgatattcatgaggagaagagcaagtctgatgagctggaagcactcgtcacccgatatgatctggttaaccgcgccttggtggaggcaccgtgggatatgaccgttgtggctggagatgtggttaatccaaataacgaattttggtggtcaccccagttccgtaaagagttagggtttaaagacgagcaggatttcccgaatgtgttcagcagctggagcagccgacttcatccggaagaccatgatcggacgatcaacgaatttgccagacatatgaacgattacagtggtcgtacgccgtacgatctggattatcgtttgcagcgcaaagacggggagtatcggtggtatcacgcgggtggggagaccattcgggatcaggatggagtaccactccgtgtagctggaaccattcgagatgtcacccatgagaagaataaggaacagatcgtggaagccatgaatctgaaaacaaaacaattatcggagtccattggcgagatggtacgtggaatcaactcgattaccgatcaggcacaggatctggtgactgcgcaggaattatctgccgatgcagccattcaagtgaaaagcagtgcagatgatacgaagaatatcaccgtgtttattcgagagattgccagtcagaccaatctgctggggttgaatgcagcaattgaagctgcacgagcgggagagctgggactgggatttggcgtcgttgcaggggaagttcggaaattggctgatcacagttcggaggccacagtaaatatcgaagatagcatgcagaagatgaagacactgattgatcagattcttgagcacatcggtaatatgtccacgttaacgcaaaatcaagctgctctgacacaacaggtgaatgcttcaatggatgagatcaacaccatgtcacaggatctggttaattactcgaggaatctataatctcgaagccgtttgttgtaacatcacgatcattgacacacatcatcaacaaaaaatccactgggatgcatttctgctctcggtggatttttgtatttctatctatagataagatgtatagcttcggttttagctattgaattagacttgttgaactttgatcaggtttgtattaccggattgaccgattggaacaccagcggacaacacaatgatgtcacctttttcaatgtaacctgttttgattgcgttacgcgtagcagactcgaacatttcatccgttgtggttactttgtcgcccataaccggaataacaccggagagcaggcagattttcgccaatacttcttcatgttgtgtaactgcgatgattggtgcttttggacgatacttggagatcatacgtgctgtgaatccactctcagttgaagtgatgattgcttttgcattcagtacgagggaagaacttacagcgccctgactgataacttcagtaatatcagcgatctgttgagccgatttttgtgcgaattgctctttgtaatcgatcatcgtttcagcacggcgagcaacagcagccatcgtgcgcacggattgtaccggatatttaccagcagctgattcaccggacaacatcacaacgtcagcaccttgaagtacagcattggccacgtcactaacttcggaacgagtagggcgtgggttcacttgcatggactccagcatgtgtgtagctacgataactggtttaccagcgcggttacatttatcgatcatttctttttgcatcataggtacgtcttcgatcggcacttcaaccccgagatctccacgagctaccatgatgccgtcagatgcttcaataatatcgtccaggttcgtcataccttcctggttttcgattttggagatgatctgtacgtggtctacaccacgttctttcaaaatgctgcggatttcacggatgtcatcacctttacgaacaaaggatgctgcgataatttcgatatcgttttcgatcccaaatccgatgtgcataacgtcacgctcggttacacctggcaatgtcgttttgattcctggcaagttaacccctttgcgtggtttcagaatgccgccactgatgattttacaatggatatcggatccttccacagacagtacagtcagatccacaaggccatcatcgatgaggatacgatcgccaggtttcacaacgaggttcagttctggatagtttaccgagatacgctcagcgtcaccaagaatttcttcagtagtcaggatcagctctttacccgcttgcagatggcatgatgcttctttcagtttaccgatacgtacttccggccctttgatgtccatcatgatcggtatataggtgttcagttcggaagctgctttgcggatattattaatccgtgtaacgtgatcttccagttcgccatgagccatgttcagacgggcaacggtcataccttcctgaatcattacttttaacaattcgattgagtcacaagcaggtcccatggtacaaataatttttgtttttaacatgctaatttcctcctcatatttaagcttatatgtgtattgtagcgttttctgtcgaatcagggtatgaactatagtacaatgattagagtatagtccgataatgaggtgtgttatggtcactccacttgaagtacgacatattaatggtgtcggttggtacgaagaagctgtgcaatctcaagaaacttggcggcttagcttggttacttatggaaaatgtgtatattgggtgaacggtgataaacagatcatggaaaagggggaattgctcctcattccaggtggtaccccatattacggcaagagtattcctacagtaacgcacacacagattgtaattcaattgcaacgcgaccataccgaaactctgcctgcactggaacggtatgaggctttgcggcataaacctggatgttacgaactgatccatcaacgcatgagcgctatttatcaacaatggcaggagcgtccgtcttattatgtcatgatgagccaagccttattgatggaagtgttgatttatatgaacagggagcttgatcgtggagttatcccgccggagaggcataatcatgttgaacggatgaagagatatattgagcggcattatcgggagaaagtgacgaaggaagaactcggggacgagatcaataaaactcccaattatgctgccgcattattcaaaagcatgacaaatcagaccatcagtcaatatgtccatgatcaacggatgaaacgagccatatatctgctcactgagtcacaactctccatccaggaaattgccgaatttctcggctaccgggacctgtcttatttttaccgcatattcaaacgtataaccggaagtccaccgtctgaccttcttcatgaacgaccacctatagcatgaaacgcgtactccaacccaaataaagttcttctatataagtaggtttaattcaatgagtacaaaaaaagagggcctatgccctcttttgctgtatagcaggatcatcatcccacctgttacatatatatatgtcgttatacatgactgcttgggttagaggctgtgagtggctgcttgcctttttttcgtgcctgcccaagacgaagagcaaagacatgtacagtccaatacgctccctcagcaaacaaaatgcctccagcgatgtccagcaaggaatgctgttttacaaacaccgttgaagcaataatcaaccacagccataccgaccaagaaatccgtgccaaaggcttaaagttcaagtgtctgttgatcataataaacagcaagtagctggtcagaacgtgaacacttgggaaacagttgaagggcgcatcattggtatagataaactgtactaacacgctgctcagatcagttccgccgatctccgggcgcgggacatgggtaggaaacaccgcaaaacagacattggcagccatgacaccaacattataggtaatcaacgtacgccagaatagcgacttgttcgtcagacccaaatagagaaatccaagatacagaatgggcatccagctaatgtacggataaataaattctttgagaaaaggaatctgtgtgtcaatccaagcataattgtagaagacatcacttccggtgttgctgcctagaaatacgtaaatggagccttggagcggtatgcacagaatagccagtaaatgcccccagcgctgaaagaatgctttcatagtatccccctgatttcattatgcattgtgaaactatcgttatgggtagttcatagatataagacgctgaagagtcgccacacccctgcagcattgaactcttgtaatactataatggacagataaaggtataagccatacctgattttaggggaaaagaggttaggataagtctcttttttgttacttttatagttttatccataataggaatattcaatatacggatgatgtgatacaactatattggcatataagttcttatgacaacggagaacataaatgaaacgaggtaggtaaatgtatgattaatgcgcaatccaagccaaaacattccttttccaagcgcaaacctgtgctcaccgttgtgattattgagctgcttcttctgttagccgtatttgcagcaggggccattgcaacgataaaacaactggactacacttcccctgtactcatttcttttacacccattgccattgttctgatgatctatctgacgttaagacgcaagtggggagagactggcttccgatctttgcgaagtatcccggctggccacgcaaagtattatattccactactccttgtactgggtacacttaccctgaaaggatttggggagctgagcttgtcacgagtagcctttttcatcttttttaccttgctcgtagcttttgttgaggaaacgatctatcgggggcttattttcaaaatattgcttcgaaaaagtgcagtggccgcagttgtgacctccagcatcttgttttccatcacacatctattgaacgcattgtctggtcaggatacgacggatacgattatacaattgatctatgcgctgctcctgggagctgtactggcgttattgatgctgaagaacggaaatatcgtaccgcttatattgtttcatttcatacataatctgattcaatttctagggaatgatctggaggacacaggtacacttccttacgatctgtttatactggcagtactgattgcttactgtgcatggttagtgtggagcattcgaacaaattcgtctattccatccaaagggagtgagcaagcaaatacggttgttcattaagggtattgcgggtattgcttgaaagtagttatcatacagtttcccgtcagcagttggatcatggtatacttcagtctggcgggaagacagatatgttcatgatacgaggtctgcctatccgtacattagattcagacagtaggtgatattgtggagaagacagcacaaggcgtagcagaatggatggtacaggagattaaattcacaggaacacttcatcaggaagctgccatagaatatgtgaaaacccattttggtgaagagtttgtttttgtgaacgagaacggcaatacatcattgtccaaggaagtgaagaaagctttccgaaagcttcatcgtgggcagatcgcctgggatcgggatgcatttatgtgggcatggacatagtgtgttatactggagtaagaagattcattggttgtgttggatatgcatgtcagaatgttatataaaaaatgtataagatggattagatctgcatatcctttcataagaccatacataagcggccacacacataagtgtgataaaccctgtccccgcgcgtgttaataacatgtatttccaaagctgtttgaaaagaaaatacaaagatttgcttttttgctgaattggagttataataaaaacaagttgtagagagtggaaaacctaattcatatattgtaaagggcgatcacttataggtttatgactggtacctttttcaatgtgtgaatttttatttgcttgctgcaaagaacaaaggaacatgttaatttttatttggaggtgtaattcacatgcaaaacggaacagtaaaatggttcaacgctgataaaggcttcggtttcatcgaagttgaaggcggagaagatgtattcgtacacttcagcgctattacaggcgacggcttcaaaactctggacgaaggtcaacgcgtacaatttaaaattgtacaaggaaaccgtggtcctcaagcagaagaagttgtaaaactgtaattaaagcatagctgcctttaacatgttaaaatggtaaaggcagcttcttttttttgatcagttatataaaagtcgacccattagttgacgaggcaggagtccggtgggacgtgaaacttccgctaagtgtaggcttctgtgaaataacgtcggttagatgtttttccataacaaagggggtagaagtcatgtataatcgcaaaaaaccgttggaagagattccacaagctgatgcggcaatctgggaatgtacgagtgatacgtgcaaaggatggatgcgggacaattttgcgtttgataacgtacctacttgtccgatatgtgcttctgagatggtcagcacgactaggatgctaccattgcttgagaattcgaatagtaatctgaaaacgatgcctaaaggaaatcggatttaacatagcttacccgcctctaacgaggtgtttttttttaagatcaaacagacaccctgtgcgaaggtaagggtattaaatatgaagttcccggcattcgttttggcgaatgcctttttttgtatcattttttaacagtaaatatagtgtaattgacgtgaatcgtatgaaaaagataaagaccccttttgctataagcaaaaagggtctttgttatgactataatttttacaacgatcagattggaatttagatgaacaggaacggcagcagaaacaatgttgctaccagagccagatcgattcctgctccatagccgtaacccccaccgtatcctccgtaaccatatcgaccgtaggccgaagatttaactttttttgttgcaacagcgtttttcttgctgctttttaccagctgctgtttggatttgactgaacacagccgtggtccctcgaaacacccgttcaaataaattttgccatcacgacattgactaagcgtaccatacatatgcttaccgtcgttcataacgagacaaacggaacgtccaacgtgcggagaaaccgtttcttcacatacccgattaattctgtacatgcaaatcctcctcattagatgcggttgccgcttgaattcaacggtttgtatatcatagtaaaaagaagaccaattggtatggacgagtacccggaaaatcgaatggggaggagccgtttttgaatctgctccatacactgggagaagtgaggaggggatgtcgcgtggattatcatgacatgctggctcggttaggggagggaagtgcccatcctggaggatttttggcaacattgaagttgctggatggcttatctctgcctgtgagtaatcatattcttgagatagggtgcggcactgggaggactgcgtgttacctggctaaaagtggatatcgggtaacggcgattgatcttcatcgcaatatgctggataaggcagttcggcgagcgagacgagaacgggtggatgttcgatttgttcaggctgatgtaacatcgttaccttttccggaaaatcattttgacgtggtatttgtggagtcggtcacgatcttcaccccatggcggagtgcacttgctgagtatagaagggtgttgaagcccggaggacttttagtggatcgggagatggttctatcaggccagaagaccgaattgatgtgtcgtaggttaaagcaattttacggtatacgaaccctggtaacggccacagcatggagaaaacgcctcaagcagtgtggtttcaccaaggtagaggtcaaagaacattcgcgatccatggcaaaatggagcgttgatcatgatccacatcgcgagatcgatatgaattggtttgaggatgaacgtatgcaacgaatgagtcaaaccaatgatcgtttgctcgcgaaatacggcaaaaagttgggatatgctgtttttgcggctagggcaccgttggaggtcaaaaaggaaaaataggaaaaagacaactcacacaatcgtgtgggttgcctttagtttgttttgacagaacgtactacaacatatcgttgtcgataatccgccagtggtgtttaagcagggcttccagttggttcttatctttggctcgaaaagcacttaaaatttgccggtgctcttcattaacttcgagcagtacctcagatagctttggtttattatcactaacataagattgccggatgaaactgttcttcaatgtgtttaacatctcaatgactgttgcattaccacatcgctggatgtagagattatggaactgatattggtttttgttgtaggcagcaagatcaagctggctgatatcttcgtccattcgaacaaccagagtttccatctccaaaagttcagatggtctgagatggtctgctgcaagtgtggcagcaagtgcctccagcacaccgatcgcttgggagaactccagttttttgcctgcatcaaaaggagtgacaataaatcccctgcgtgggatgtattgcagcagattgtctgaagccagctggaaaagcgcctcccgagtaggtgttcgactgatgtccagctttttgcatatctcggcctcgttgatcttctggttgggaagcaaggttccgtcctggatcttctgggcaatgtaatcgtatacgtgatctttcaaggaccggtatttgggtacctccataccgaatcctcctttctatgtatagtgaataaatagatgggtgtgaggccgtactgtacgcgccgttcaggagtttcaagtttttatcatcttaacaccgagggggaagttgggcaagcaaacttcatgtttcagccgatgtaaatgccatgttatatatagcacattttatggaattaaagcgtataaatgtttaaataatgattgtgataaaccaaattatttgttagtattacttacatataagtccatatattgtcttatgtatattgtatacaaattattctgttactcattcaaaaaaagaataggggtatgatgtgtgaaaaaagtgcttttgccaatgatgctgttgttagtggttgtattcatgtccgcatgtggacatgaaaaaacgacaggaaccggatcagacgctacttcgtcttcgggcagtagctctgcggaaaaggaagtcattgtacttggaaccagtgcggactatgcaccctatgaatttcataagaaaatcgatggtaaagataccattgtaggttttgacatcgagattgccaaagcaattgcggctgatctgggagccgagctgaagattgaggacatggactttgatggccttcttatggcccttggtacagataaggttgattttgtgatatcaggcttaacccctaccgaagaacgaaagaagaatgttgattttacggatatctactattatgcagagcaggctgtacttgttagagaaggggaagataccgcattaaagtccatagatgatctatcaggtaaacaggttggcgtgcaaaagagttccattcaggaagggattgctcgggaaatagagggagcaaagctcacttctctggccaaaatacctgaactgattttggagttgcagacggggcgcgtagacgcactcatcctggagaagccagtggctgaacagtatgtgaagaaccaagaggggcttgttgttgcgggtgtagagattgaacaggctgaagacgagggcggttcggcgatcgcggtgaagaaaggtaatcagaagctgctggatcagatcaacactacattggaaaagctcaaaacaaacggagatattgaacggttcgtcgttgaagcgaatgagttgctcggcgaataaaccggacgagtgagggatatgccgtgaatttagatttttcctttctattagaacattggcaggattatgcacgaagtgcgtgggttacgcttgaactttccttcttcggtgtattgtttggtacgttacttggtgtaatcatggcattgatgcgaatatcccgaatatggccaattaaatttgtggcttcggcgtatattgaactcattcgaggaacaccgatgctcgtacagattcttattattcattatggtctgacggttgtgggtgtgaacttatcggcatttatgtcgggggtggtagctctgacgatgaatagctcagcttatatggcggaggtgttcagggccgggattcaagcgattgataaaggacagaccgaagcttcgcgctcccttggtatgacaaatggtatgacacttcgttatattatactaccgcaggcttttcgtaacatgcttccagccatcggtaatgaattcattattatcattaaagattcttcgcttgtctccatgatcggcatagccgagattatatacacggccagaacgattcagggtgttacgttccagccgcttgctccgttgcttgttgccgccggcctttattttataattacatttacactggctaatttactttcctggctggaacgtagactgtctacttctcgctaactgttgataaagaattggattcgagaaaggcttggagtaggctggagtggaaaaagagagatgtagtcgtaaatggctgtgatatcgcatacattgttattgtattttgtatacaatattttgaaaaggtgttgggtgtatatgtcagattccaaaatgttaattgattgctcggagcgttatgctgcacctaattatcatccgctcccaattgttattgaacaggcggaaggggtatgggtggaagacccagaaggccgccgttatatggatatgttaagtgcatactctgcattgaatcatggtcacagacatcctgtgatcatacaggcgctcaaggatcaggcagatcaggttacgctgacatcacgggcattccacagcagcacagcttctcttttttatcagaaactctcacaattcacggggaaatcgaagattctcgccatgaatacaggagcggaagcggtggagactgcggtgaaggcggtacgtagatgggcttatcgttgcaaaggtgtaccggaaaatcaagccgaaatcatcgtatgctctggtaactttcatggaagaactctgacggttacgtctttttcttcttcagcggagtataaaaaagattttggacctttcacacctggattccggattattccctatggagatattgaagcgctgaagcaggtcattacaccaaatacggctggttttcttgtagagcctattcagggcgaagcaggaatcgtcatcccgcctgatggatatttggcagaagcttttgctctgtgtaagagccagcaggtattgactgtatctgatgagatccagaccggatttggcagaacaggtcgccgttttgcctccgactgggaaggggttgaaccggacatctggattatgggcaaagcgctggggggaggagtcatgccgatctcggctatcgctgctgatgcggagatacttgatttgtttgagccagggtctcatggttctacgtttgggggtaacccactcgcctgcgccgtggctatagcagctctgaaagttcttgaagatgagaagcttgccgagcgatcggagcgtctgggaaactattttatgaaaagacttcgagatattcgcagttcagccatacgggatattcgggggaaaggcttatttattggtgttgatctgcatgaaccagcccgcccttattgtgagcgtttgatgtctgttggactgctgtgtaaagaaacacatgagacaaccattcgatttgccccaccactgacgattaaagagtccgagattgactgggcactggagagaattgagcaggtattgatcaccaatgagggagctgacctacatgaaaaatgatgatgtccatggtggaataaaagatacttctattgatacaagtcaaacatctgtgcggcgtaatattgctatcattaaggttccttttggactcggtggagcaagaggtggagcagagttggggccagatgaattgattacagctggactgaagcgggagattgcgagtcttgggctagtgctttccaaagaagtgcgggtagattgtccttctgaaccggctgcccctattgagcgaaatcgtgtaaaacacttaaatgaggtacgtcaggtcagtgagaaggtgtgtagtgaagtatcaggtgcagtagaggagggggctttcccacttgtgcttgggggagatcatagtgtagcgattggtacttttgccggtctaacagcgcactattcgaatttgggtgtgatctggtttgatgcgcatgcagacttgaatacggaagaacgcagcttgtccggtaatatgcatgggatgagtgtggctgcatccttggggcatactgcattcaatctgtcgcacattgctggagcgggcgcgtttatttatccgtccaacttggtctatattggtctgcgtgatctggatgagtatgagaaagagcagattaagggactgggaatccgagcatttacgatgcatgatattgaccggatgggaataaagcaagttattgaggaagcaatagctacagcgggaaaagggacagatggtattcatgtcagctttgacatggattgtctggatccgcgggaagctccgggtgtgggaaccccagtacctggtggtctgaattaccgagaggcacattatgcattggagatacttgcttccacaaatcaagttacgtcgatggaactggttgaggtgaatccgttgtttgatcataatagacatacggcacgacttggtgtggaactgatcgcttcgttacttggtaagcgcatattgtaatcactgagaagtgaaacggaatgtgtaagctgtgcccaaggaatatactttcttatttattatagaaggaaagaaaactgagatctccgaaaactagggctagtcacaatcaattgttcacagcaatcgcagtggaagtggcttccctggttatgtttaatggatatgtatattagaagcgccgtaataaggatgctgagagtgatttctataatacaggagcgtcagattacatattgtgctgatgatgtgggttgattatcatttttgaaaaaagacttgcaattgaaatctgtacatgatatattctaattccggccaagaaaacacggtttacacggtgcggcaagcgaatgaaataagcttcgaaagaaacttaaaaaaagagcttgcaaagttggttcggacatgatattatataagagttgctgaagagaacaaaattcggtaacgaaacaa

SEQ ID NO: 22 - DNA, 18729 bp, Paenibacillus xylanexedens
  source 1..18729: mol_type = genomic DNA
ttcaaacttttgcgttcattctgcaagcagaatgtttactcactcgttgttcagttttcaaagatcaaacttgttttgtcgaccatttcttggccggataaataatatatcatgtttaggatttgtttgtaaagtctttttatttttttatcagctctttacggcagaagatttaatgcaccggacttaaccctaattaataagatgtaaattatcagattgcttattaaccatacttccggctccaagtatgtatattcgtttcttttagcccccttgttgagttataaaactcatacgtacgaaatatcaaaatccattcctccaggcagccctatgcgtgtaacgtgtatatctatttttgttaatgataatctacgaacattgttgagattacaataagtattagctactacttagtaaatcctattaaatcccctagtttcattgttgtctttctcttgttccgttcttaccgatccagatattaattcctttcatcatctccaagagcttccataacgatataatctatcttaaacaaaagtgaatgtttaatactaatacataaattagtgctgactctctcaacaaataaaatagaataatagtaatatcacttatccatgcttacaggtttatttaagaatgtgtcgaatatcataagcttatctagtttaaatgatactactggaggcaacaatgagtataatcttgcacgaagtcagaataaaaaattttagagcattgaaagatataaaagttaaattgtcccctctcacgatactagtcgggacaaataactcaggtaaaacatcatttttaaaagcattagagcttgtattcgggttagatcgcaaacttattcgtaaagaagactttcatgccactgtagataaactgatagcgactgaacagagttctactatagatactttaattacaccaacagggcaagactcaaagagagttcaattttttgatgaaacatggtcgagtcactggggagcaaacgcgatacgaacggatcaaaatgaatcagaatacgttgcaattagaactacaatcaaatttgatgaattaaaaagagacttctcattggaacaacattttctatccgattgggacgagaatcctgacgaatggtggacatcaagtcttttagataaaatccctttaagtatcatggaaaaactacctttgttgtatctagacgcacagagagatatccatagagaaatgcgaaatcctcattccttttggggtaaactaatttccgacattaatctaaatgaagatcaattggaacgcatcgaagctgatcttctaagattaaacacagagattgttagcaacagtaccattttggcacatttacagcagaatctaaaagagctaaatctgttttcatcgggagaacacaatggcgttgaaataacacctatagtaagaaagatcagagatatatatcgaggtattgacgttctctttagtgagccaggtgacgatagttttccacttgaatatcatggcatgggaacaaggagctgggcaactttactcgcatttcgtagttatgcttcatggattgagggagttaaccaagaaaagaacttacctttttggagtatcttagcactggaggagcctgaatcacacttacatcctcaggcacagagaaacattttaaaacaaatggcatcatttaatggtcagaaaataatcagtactcattcaccctacatcgctagctttgcaccattagaatcaattaggcattttagcaagcatgattcacgaacagcggtttctgaaattaatatgactactatgcatagagatgatattcgaaaaataaatagagaagtaatgaacagtcgcggtgaattactcttttcaaaatgtattattctttgtgaaggagaaacagaagaacaagcattacctattttttttgaggctcatttcggttgtaacccatttgaacttggaattaatattattggggtgggcggaaaaggaaagaagtaccttccttttctccatgttgcacaaggattaaatattgattggcttattttctctgatggtgaaaaagacgttttagatcaacttaatgaggctctcttactcgttgatactaaccttcaagatccgagagtcatttattttgagaatcatcaaaactatgaacaatatatattagctcattatcgagaagaagcgattaatgctattattgagtacgatgcagttaatgagcaacataaagcaatattgcaaaaaaaggaatactctgatgaagatgttttgacaaaactacaaagtgggaaaactaaatatgcttctgtacttgctgaaacaatcgtcacgagagcagactcagagctaaaaattccagagaaaattatgcaattatttctacaaatcaaaatataactttataaaatggcaggtgattcattttggattatatgacctctgaggatcatcaaaaggtaatcgaacatattcatggtcccatattagttaatgcaggacctcaaaccggaatacacacaacctcaataaagcggctggaacatatacttaagaatgttaaaggaaattacaaaattctaattttaacttacaatcgtttattggctaaacagttcaaagagagaatattaaatgaaattcaaagtgatgataaaaatattttagagagattttttgtcggaaccatacatcaatttgcaaaagatattgttgaaactcgaggggatgttttaggtcttaaaactaaagaaatcgttttaatagatagttcagaatcagagaatattcttaaagaaatactcgtcacccgttcaaatactaattcaccttctcaaaatttaagtcaaacaaataacgtaaatatagtaagagagattttatattatatcagtcgtcaaaaaagagagctgaaacttcctctcccttatgacgaacacattgatgatgatacaagattctacaactctatttattatgaatatgatctatatttaaaggctcggtcgttaatggacttagatgatctcattttacttgcatatagaattattaatgaaaagccttctattaatcagatttaccaaagaatttttaaatttgcttatctatttgaagcacaggacttaacttttgcatcttaccaattttttcaaacattgtatcctaaacataacagtaatattatgctcgttggtgataaaaaccaagcaatacattctttcacaggtgctagtacctcttttatggaacaattcgaaacctattatgacccgactattgttaaactaaaaaataattaccgttcctcacccgagattgcatctcttgtagataagttaatttcaaaatcaagtttttcatccagttcttcaaaaaatggctcggtgcttattaaagaattagaaaatgaggagaaagaagcaatatggattgcagaaaatatttcaaatttggtgagacaagaaccatctgaaataaatgagaagatacattgggacaaaattgctgtaattgcaagaaaccgttcatctctccgaagaatcgaaaaaaaattctcagaatataatataccctttatcaacaaaacatttggtgttttagagagcgaatcaactattatgcaagtatttgaatctggttttagactcttgattaatcacaatgataggtattatcttgacctctttcaaagtttaattgggatggaaaataaaaatacgatcaattacaacagcactgaaaacggatttgctttacttaaacatttcgagtcattagtcggcaaggaatggaaaaagaactataaaacattattagatgcgtggtcatatttatggggacctgatatgaatttctcagatgcactacttgttctagaaaagtacttcctgtctgaaaaacctgttgcaagtatcgaagaactaaatgtttttattagtgatctaaaaatgtggcgagataattggaatacctatattcgggataacaatgaatacaatttgatttcatttaagaacaaatttacctccttatcaagaacaaccggttccggtggtgttagtttactaactccgtcttcttcacaaggtttagagtttgatgtcgtgcatgtactcggaattaatgaaggggtcttcccgatgaacgaactttcagtagaagaagacagacgagtgttatatgtagccttaagtcgtgctaaaaagcttttgtatctatcttatatcaagtcaagttcactaaaaatgggtgctaggtatagacaaccttcccgcttccttaaagagatgaaattattatagatggtaaatgtgcgtgtttaaaaattcagggattttgtcctcaaaatggtgcattgaccacacccttttgaactaatattatttcctttaggttaaaaccaaggtccgtaccaacgctaaaagcgccggagattttccccgacgctttttttacgttcgacataggaatcgataatgagaagcaggttcgagtaaaattctggaaaaccaatatccattcttgataactaagggtgcctaccaatcttaaatggtagaatgaatggttatgccggaataaattaaggaactactatctcaaagaccattacatagaaaatcgaaacctacactcacttaggaaatcatatcggagtgttgactccttaaagaaagcaactgaaataagcgaaaaaggtaagccattcccttgtggtaggcgttgttaaatatcattttttataatcgtgtaattcgtattaattaaaaccgtaattaaacccttagttttcatggccacagacagccattcattagcttgccttgtttcacctacacattcaattaaccaaacggagtacggcataacccgctcattaaattcttagacataacaaatatttcaatttaggcactccatacggagtgcgtcccaatttctatgggatctgaggaactacctgagatatttcaatccacgcactcatacagagtgcgacatcaaaaaagacgtgtcatctctattacacaaatgatattgacgtcttttcagtattttaactttcctttactcgatcagcttggcaattatcgttgtaaacttactcggacgggaaggtgtaccgggtcgattcaacccacaatacataagtaaaaagaactatcaataacttaatggattaaaaagaacagttgccaagatggcagactgttcctgatttcttaaccgttagtttaattgggtggtacatattatggtcagtatcaaatataaatcacgtaatctgaccttacttcctccacatgccctgattctaaacaaatttcttatcaatttgaagccaagtgaacaaagataaaccattaaacgtcccttctttatgtgtacctggaaccgtggtccaattacgtagcatgtgccacgcattatccgcaagtgcttggtttgttcatctaattcagttatttcggtccatatggattcatgcttcatccactatcaatatattaaacatacaacagacattctcaactctaaggtttctctagctaagtcatattacgaatcatatgaaagccaggacgtggtaggtgtgctactagggcttattgtttcaaacgatggacagaggaactattcagatttaacatgatgcatgttaatcaaaatgtctccagtgaccggattattagaatggcatttccgggttattagctcaatcatgaacgtattcaaatcactttctttttctataagtcaccaaaagaatgaatttgttagacaacttttttcgaattggccacttatctataaaatacggagtgagacttgccttagaggatgccactgtttatcctgtaccaattcaatccacgcactccatacagagtgcgacagtgtatacagcggtatgccggcacccacaataaagatttcaatccacgcactcatacagagtgcgactaaatttaagttaagtcaacaccaaagaggtattatttcaatccacgcactccatacagagtgcgacgttacgttgtaagtaaaatagaccaacaataggagatttcaatccacgcactccatacagagtgcgacaagggcgtaaccaatgtcatgcaagtcaatggcatatttcaatccacgcactcatacagagtgcgacgtatgagaatattataaaaggagtcctgacaaatatttcaatccacgcactccatacagagtgcgacgatcgcaaccacgccgtcctcgtccggagtcgaacatttcaatccacgcactccatacagagtgcgacatgatagcttgcggtatggtttaccgtccatgcaatttcaatccacgcactccatacagagtgcgacaagaagtccaagggaaagagttctacgaccagttcatttcaatccacgcactccatacagagtgcgaccagatgccaccctgtatagtaactatggccttactatttcaatccacgcactccatacagagtgcgaccagatgccaccctgtatagtaactatggccttactatttcaatccacgcactccatacagagtgcgactttaatttcggcacaagcgccacaacgtttgtcttatttcaatccacgcactccatacagagtgcgacaaatgaattcccgatctgcggaatgatgtccaaatttcaatccacgcactccatacagagtgcgacgctgggcattacgccaaccggatcgccagtattgatttcaatccacgcactccatacagagtgcgacaccgccatattccacgtactcaatcacgtctctatttcaatccacgcactccatacagagtgcgacggatctccagcggcggggctgagtcgggtttgttatttcaatccacgcactccatacagagtgcgacaagtcattaacgatctaatcaccgagtttggtcgagatttcaatccacgcactccatacagagtgcgacgttcaaaatataagcataagcacaggagataagttgatttcaatccacgcactccatacagagtgcgaccttccgttgacggctctttaacccaaaacttccaatttcaatccacgcactccatacagagtgcgacggatatcatgtccgcttacatcacgccggttaagatttcaatccacgcactccatacagagtgcgacagcgaaaagtgacgtaataactatgcttgaagaataactattaacgtatttccgatatttccactactttaaaccggttatcacaaactttcgaccataaatcattaccaaaaggtcacaataaagaccttttcgacaaatttcgaggtgcgaatcccccagggaaatcatgtgagcttggcattcgcacctgctaaagtattaacggatcgcccatatcataggaatctttggcacctacatgttgaactttacttttgtaattatcacctaagttataaaatcgaagactatctgtatccttatcaatcaattcttctagttcgaatcttaatcgtctaaattgggcagcatccagtatacattcaaacaccgagttctgcactcgctgaccgtgatccacacactttttcgccactttagatagtcttctacgcccttcactatctatcgtgcttacatcatacgtaatcaaaataagcaatcgtcacacctacttccacagaaacgggggatactcatccagatcaccccgtatatacctggccaatagcaatgcttgagtatagggtacaagcccccaaggtattttttcattcaaatacggatgcataatcttttcctgtttgcgttcttgccatgcttttaacactttctttctcgtctcatcatccataatcactgcgagattttctttcacataaaaacctttatcgttaactaccttcttattaatgagagaaagtacaaatcggtctgcgtacactcctcgaagttcctccatcatatccagtgcaagtgaagctctgccaggacgatctcgatgcaaaaaaccaacgtaagcatcaagtccgacagattcaagcgcagacttcatatcattagcgagtaaggtataagcaaaggataataacgcattcactttatccagcggaggacgtcggctacgtccataaaaataaaacgattctttttgctgtagaatcagatcatcgaacacagagttatattgcacggcagcggatccttccaatccgcgcaatatatccaattgctccacctcgcgcaacagcttcatcgtttctcctagcgactccgtgaccttcttgattcgttctgtgttaatgcgtagcgcataatctcgtgttgcacgttccaaaatccacttggtgttatacaactttcctgtaatcatattacgagcaacccgcgcactgcgctcctcattgtccgatatgcggtactgttctttacgaaggaccacatttcctcgatcttcaccaatgacacgtgcgagaaatcgccccgttcgtgtcataaacgtcaaacttacatttcgtgaagcacaagcccccatcaatgctggacttactccagcatagccaaaggtacaaacggcctccaaattatgcagcggatagcgagcaagaatttcttcctcctgcttcaccacaatgttttccccatccagtccaaggtatgtatcgggtaatgttacaaataaggtgttcagcagctttttcattcattcaacctgctttcgatgtaacttgaaacggagcgtttgttcaagatatcaggtacacaaatattgtttaaagaacaactcaggcaatgtggccccgctttggctttgggtgtatggttccgctcaaaataatgtctcatctcttgaatacttgccttcactcgttcccgatctgccgcagtaatgatgacttcaaccctatgtttgatctcgtcataataaaaataggccttgggaatatcacatacgagcatttcttcgagacatatgacttgtgctaccaattgggagtgatccgaatcatttcgtttgggcttcccacgtttgtattcaacaggataaggaaagtataacccttcctctcccgcaagtggaactccagatggatcacgaatgaattcaaccacatcacagatgcctgtgatcccaagttccctcgattgcaccggaagcgcacgaaccaccagtttatcgcctcgtttctcacgaagcgctggttgatctgcttttcgatgcagatgatcaccctcaatggtgcgcacgttgtcttcccactgctgttcgatatgaattaatgcccactgccttctgcaaaagttaaaatgctgaatacccgaaagcagcagataatcctcttcgttatagtccttcatattcttggactgccaagccttccagtggcaccaccgtatagttataatcatcgtaggactttgcttctgctacgtctggcttcaattcaatttgcagagaacgatgtactttcgcagatgaatattgccccatcttggaactatgctcccaccaatacagttggtgcacctccatactaccgtcaggacgggcagaagacgtatcattttcaaataacgttctcagtgattcacgaattttctctgcgtcttcatatgtaaagccggtcttctcagccagttgcgtgttgatactgccatagaatacatatactccaaaatctacgcgatgcttcatgcccatcgtatccgatccttttttgtccggatctttagccgttgtgaccgagtttacactcttcgtaatctgcatgctggaaatatcaatccgatccaagcttaccgcagtgtggatggatactggaccccgaatacccacagatacatcggtaccgctaaaagcaaatacttgtccaaaactacgtacgtctatccaggattgacaagcagcctccgcatacagatctttgtttgccttcttgcctttggcatgttcttgcacattctcattggcatcaacacgatctttaatagaacggtgactatcattacgtttttcatcggattgtacgagaatggactctcccatatcctgcagacggttacgaattttacgtttgatacatacatccgagatttcccctaaaccatcatagttctgacgagggcggtttccattcaatggatcaccattcgggttggcattacgaacagacagtacaacagcaaaatcgattttgtgatcaagtatactcatttagttatccccttgttcgttcaattggttttcatcgtctttatcaagtgcagccgcggcttctttatcttttctacttgtatataaatcgttacgctgactataaaatcctaataagtataatcccgtgagtggcttgtctgtaaaatcttctaattgaagtttggctccaacttcatctagcaacgaattataatatctggcactcgtccccattcgcgcttggtaaggttggagattagattgaataatgctccaagttctgcctggtcgttgcgcaaaggcgttcatatatcgaatggcatttgttgctcgtttttcctcttttcccagagcacttctctctaatacatctgcaatggcaagcattctgccaaataagtagctacgatccgttgtttcggtattcagactcactccgtacccctccttcttattaacaagtgcgcaagtaatactcagtgttttctcccattcccaattttccatgcctaccgggttggatgcacgttggatagaactgcgaacaatatccagcggaatgggacgttgatcaatgatacatggaagcatccgctccatgagtcctttaactaccttgtcactggctcgtgggccataggctgcaaaagcaatgtctttggtcgcgggcgccccaataaacgagacgggtttgtcgtttttatttttccgatactgatgtatccagtaacaactctcatgccaagctgttatccggtccagatactcgttctgatctaaactccgataaaacataatcgacattcgccctggtgtggccgcatccagtgtcatcaaagttacttcatgcttggagttatactccccatcgtatcgatatccaccaatcgccttcctgatttgcaaggcaaaatccttatgtgttgtatctccaccagcaagtgcttcctgatcatcttcatcttcccataaactaaaagaatcttcttgaggttctggcatatccagacttgtactaccccacaccagaaaaactttgccgtctatagtggttccttgtcgatcaataagccacttcagcgcgttatggcctttctgtgaagcttcgtagctgactaccgctgcatcacgactggtacgaaaacgtccccgatacgtaaatccactagagtcgttggcggagatcaacttggacttgtcccctgagtgacgtatgcgagaagcatgtttatcagcaactggtaggtaatctcctgtcacgaaacagatatccttgtcctgcaaactcatctcgtagaactggataaatgattgttgcaccgaagcatcccgccatagtctggattcgggttctcctggaatatttacagcaaatcggacaaatgcaccactctgatccgaagcaatgacattgaagatgtcaggctttttcccttcctggtcgccaggccctgcgatccacttctccagcagcttaccttggctatccacatgaagtatgcctctgcttactagatcagcgatgagtgtgcctttgctgacatagtgaagcacactctgtactctagggtgactaaagggagattcgcaccaagccttcagttggatcaaataatcttgatacggtgttcccttggcttctccgcagaactgagtgtaatctcctgcaacataggctaacttgtcaaaaagcggatacggtacaggcgcactcgttcggcttgcggaagcctcggtgcagggaataatcgtgctgccatcattcttttctactactttggcatttacgatatttcctttttcattcagatgcacttcaatatgcgcggtctgggttgtgtgcgagattggaatcaaggcgtattccttgccgcttttcttcatttcaaattgccctacgacatcggcatgatcatcatacgttttgcataaattagcaagccagctcatttactcacctcattatcgaaccactccgagtgtaaatcatcaacagactgcatattctctgagccaaatattttagctgtaccttctcccgctttgcgtatcaatgtgcattcatccggacggataaaacgaatcactccatgctgcattttcgctttccacaggcgaacctctcgctcattgcttcctgtttcatccgggtaactgattccatgtagcattgtgccaaaatcaagctcacctatacgatcatagaagctctcttcttcaccaaaatggcatggttcgacgtagccctgacattcacgagttcccaagaaaatatctcttcgtcctccaacctggacagctcgtttagcgatattgtggtgtttgtgttcgttctggtcatgtaccagatcttcacgatgaggattaaattcaaaatgagccttcacctgatatcgaacatctcttaaataggtgtaataggccagtgtattgcccccgctgtattcaatcggacgcatgcccttcgattccgtttgaattggattcatgatgcggacttcgtctataatccagatcagcgtgggcttccagtaaatggattccacgatccctttgagggcttgatatgtaggaatctgataagagaatttttctcctccaagtttcgtgagcggatcagtgaatagcgcatattttcccgaaacctcaaattcgatttgatttctcaacgtttcagctcctttctatggggtttaggagggagaaacatatgtcatgaaactccccactctactttagcgtccatttcatatcatcatcgtttcccaagcgccctcccctttggattccacaccaaagtcttcagagtatgctggttcccgtagagcaaggacgtgaccatgtaacaatggatacaagtccccacttttttctaatgtcttgagttcgtgatcatagatgttcaccgtatactgttgggcttttcgcaacagatcccccaattcactcggctccaactcaccattcaggtcaataatcagttccctgccttcttctccgtaaggaacaaggacagcagtggcattcgtcgatattgcttcaaaatatttctctgctgtagcgatagcataatgattaacaacctctggttttgtagcatgtttcttttgatatgcatccacgtaatagcggttccggtccatcagatcaaacaagttctgttcgagtttaggaatagggtaatgcattttgtcttgaatatcatgaaagtaatatttaaaataacgagcaattgcttcagatgataataaatcattccccagcgacgctgggtcatccttgaaatcctgaagcactcgctctgtcttctcagcaccaattttaatctcaggtaggtgggtcaatacttcatccgacgatcggataatgtacacgttgcgaatttcatctttgccgtgcctgttacatcgaccagccgcttgggctatggaatccaaaccagccaatgatcgaaccacacattcgaagctgatgttcacccctgcctcaataagctgtgtgctcacacagatgattcgttctcccttggccagtcgttggattacgccattctctccagataggacttctttacgatgtgcagcacacatattagtacttagatgaacaatttgaaccccgctgtcttgtagccattcctcttcattcaagtgttcaaacagtttacggactgccgtttttgtgtttaaaatgaccagtacgctgtttacttctctcatttgttcctgtacaaaagaagataattcttctgcgtcccagcctgaggctgtatcttgagtaagatcatgcaattcgactcgtttgaaactgcgtccaacgcggtctaaattctgtataatctcaggttgctccgaaaaatgaagtttgtgcttcacaaaatcaagcgcgggttgagtagctgtacagagcaacaaactggagcgtccaatcacatgcaggaaattcagtgcagcgttgaagagtgagatgcatcgaacaggaacggattgcacttcatcaaatacgatgactgcattggaaagctgatgtaatcttcgtacgtttcgggttcctttcgcatagaaagtattcaggaactggaccatcgtcgtaaaaataataggccgatcccagtgatcacgggcaagcttaagactctgtttgcgcgcatcataggtttccccttcgtcgccctctttgcgttcatcatccatgtcatctacaacgttagagtgatgctccaaaatcatgtcatcgttctgcaaaatgctgcgaatctctgccgcgttctgttcaataatggtcgtatacggaacgatatatataatccgttgcttgttatgttcaatggcatgttttagggcgtaacgcatactcgcaagtgttttcccccctcccgttggtatagaaagggtgtatacgccggaaggacgaagtgcgaattcttcgcattgtctggacatttcccgccgtaatcgattaatgggtgtgtttgctttacttccttgctcaaggccggttaaatgttgagataacaactcatggcttgtttgaaaaaacgacttataatctactttatctgaggatgattcattttcttcaaactgtcttgtattggttcgatctgcctcgatcaggcaactaaagatatatttaatgagcagtgaacccgcaatgcgtggaagtttatgcttattgataatttgtatgtattgttgaagctctgaggtggctaattcgaataacttatccaaacgttcaggaggatttagcttgaaaaactcttctttcgcttgctcatagtgttctaattccttggaaacaacacgctccaggtatggtgaagttttatcaggcgagatgtagtctcttagaccctgatgatgtgagataatacagttggcaatccattctgcggtatacttgtcctgagccgttgcaccactgacatggtaacgatgatgtagtagcttgccaccggcagtggagtgatctacggaacctttacggagaggggcatcgggatgagctactgcttccagaatgtaatttcgaaaagcatctgtatttttccccatatcatgtaaaaggccggaaatccccgccaaatatctgacacctattttctctccagcctgctcggctccttgttgcacttcaaccaaatgatcttgaacggtctgaatttctccatctttctgacggatatgggcaatataggtcatacaagttcacttcttcctttcagaaaagagatcccaaacctgttcctgcactcaataattaggaaaaatacttatattaacatttcgacttcagacgacaaactcctttttatttttaaggaaaaaccttaatttctatctccattaagaagtgtttaaaatgttatatcgtagattcagttacagagtatagttctaattagataatgttgattgactcgcacattggttcgaccattttaagggagcgtacattggtacgctcccttagttgtgaatactcccataattttggaatcagaggagctatattttttgatatatgtttattaattctttatttttttgctttaagaggtgcacatccgtattcgaatcgcaaaaagacagttgtaagaaatacaatgatgtcagctaactatacttactgacaatggtgtaaggttcataccttcagcgaacttaaaccgatcaataatcggaattttagaatacagatcgtcccatcaaagaaagacctctgtgaaattcatatttttgaaagaacggtaacgtattaacctgtttaattgtaaatccttttatctcacctttgaattgcaaagctactttaaaagatagcgcttcaaaatcccgttcaagctgtataacgactaagcccctaccataacaacaggctattgttgcatatctccaaatctattatttccagactcatctaaataaaatccatttatcaaatgttttcctccttgatttcttagtaggatagtaaaccatatattcttttgtgttccactaatttatgtacttcacaatgtcaatttagcattttcaatccatgcaatctatgaatcattcttagccatcacttattcctctcacggtgaatgatacagttgtatgtttctgcccaggggtacttccatgtacatactttgtctgaaaatctcttagctttgcttttaaccccataaaaagatgacttagcgctccatacggagtgcaccagaattattagaatgcgtcaatacaaacggtcgttttcaatcaacccacctctagagtgtgacaccaatataaactaggtgatctgcatagcattgtgattttttaatccacgcactccatacggagtgcgaccatatttagaactgccagtattactggacatcattatttcaatccacgcactccatacggagtgcgacatgtagttaagtaaaaacatcatggcaaatgaaacatttcaatccgtgcactccatacagagtgcgacttcaacacgcagtgtggcgctggagagtttaaaacatttcaatccacgcaccccatacggagtgcgacgtcaacggtggaaagagctacatgctgaaggaggaatttcaatccacgcactctatacagagtgcgactgcatcagttcaactacgaagtagattgaggaggagatttcaatccacgcactccatgtagagtgcgacggaaaaaagcaattcgatgagtttgataattatggtatttcaatccacgcactccatgtagagtgcgacgtgcctgacactgaataaaatcgcatataacggatttcaatccacgcactccatgtagagtgcgacccagttcctccggtcccttcggttccgtctgcaaatttcaatccacgcactccatgtagagtgcgacccgaccgtttagcagcatgcgtttttccaaagtgatatttcaatccacgcactccatgtagagtgcgactgcatctgtaccagctccctttttagcttgcttgatatttcaatccacgcactccatgtagagtgcgacgatacgatatcacctgacattgcctctttcaatgcatttcaatccacgcactccatgtagagtgcgaccataatctgctgtgcccggataatagctgtgtactatttcaatccacgcactccatgtagagtgcgacgaccccacgaagtggccgggccttaacctcctaggatttcaatccacgcactccatgtagagtgcgacagcgaaaaaagacgtatcatctctaatacacaaatgataataacgtattttcggtatgttaactactttgattccattactcgaacaactttgataatatttcattgccaaaaggtcataaaatgagtctattcgacaaattttgaggtgcgaatcccccgggaaaatcatgtgagcttggcattcgcacctgctacagtagtaatggatcacccatatcataggaatctttggtctacaagttggactctgcttttgtaaatatcgcataaatgtatagaatcaaggctatcggtctattttatccattaattcttatcttacgcgcctgaactacttagcatcaagtatacatttaaacaccgaattccgcacttactgaccgtgatccacccacttttgtctcgcttagacgccacaacagatcataggcaagcatagtcatgttagtcgggctaccctacgagcttaacgctcccaacgctttagtgagaatttgttcagattcgacattgtgttatgttgattgaaatttctagtaatggccggattcttaccttctcgttttgtaaatcgtgaatttatcattgtaaacttctcatatgcgaaagtttaacaacgcagttaaccatcaatacctgagcggaatacctcgctcccttttgcattgaaaataacatacttactttctttccctaaaggaaccccactgtacatcccgtcaccaaggtagtttacggatgcatatcttaggaatatacgtttaccagtctcaatattgattgctgtggttatcgcaccatccttagcttttaatgcatattgaattgttgctatcggatcaatatcgtgataatagtcggtacgttcgagatcaagaacttcgtatttcacatccatcacgattttcccccgactatccacgatcccatagtttttcttcagtttcacacggtatagtggattttttgttgtcactttctcaatacggttattcatgtaattggtccgctcgatcagtggtactatttcatcgtacttggcaggcaaaataacctcaccacgatttccaatcaatccatacttgccactcttgcgaatgacggcacttcccatcttgaacaggttagcctcctcgtactgagtgggtattttgatgtctccctgtttcgatacatagccccatttttgattaaccttcactgcagcaaagtcctctgaaaatgcttgaatatctgtataattggactcgaatagt

SEQ ID NO: 23 - DNA, 12945 bp, Paenibacillus xylanexedens
  source 1..12945: mol_type = genomic DNA
gctattcgagtccaattatacagatattcaagcattttcagaggactttgctgctgtgaaggttaatcaaaaatggggctatgtttcgaaacagggagacatcaaaatacccgctcagtacgaggaggctaacctgttccagatgggaagtgccgtcattcgcaagagtggcaagtatggattgattggaaatcgtggtgaggttattttgcctgccaaatacgatgaaatagtgccactgatcgagcggaccaattacatgaataaccgtattgagaaagtgacaacaaaaaatccactataccgtgtgaaactgaagaaaaactatgggatcgtggacagtcgggggaaaatcgtgatggatgtgaaatacgaaattcttgaactcgaacgtaccgactattatcacgatattgatccgatagcaacaattcaatatgcattaaaagccaaggatggcttaatcaccacatcatacaatattgagacgggtaaacgaatattcccaacatatgcattggtaaactaccttggtgacgggatgtacagtggggttccgctagggaacaatagtaagtatgttattttcaatgcaaaagggagcgaggtattccgctcaggtattgatggttaactgacgttgttaaacttttggatatgagaagtttacaatgataaatacacgatttacaaaacgagaaggtaagaatcccgccattactagacatttcaatcaacataacacaatgtcgaatctgaacaaattctcactaaagcgttgggagcgttaagctcgtaggtagcccgactaacatgactatgcttgcctatgatctgttgtggcgtctaagcgatacaaaagtgggtggatcacggtcagtgagtgcggaattcggtgtttaaatgtatacttgatgctaagtagttcaggcgcgtaagataagaataggaagaattaatggataaaatagacggatagccttgattctatacatttaggcgatatttacaaaagcagagtccaacttgtagacaccaaagattcctatgatatgggtgatccattactatactgtagcaggtgcgaatgccaagctcacatgattttcccgggggattcgcacctcaaaatttgtcgaatagacccattttatgaccttttggcgatgaaatattatcaaagttgttcgagtaatggaatcaaagtagttaacataccgaaaatacgttattatcatttgtgtattagagatgatacgtcttttttcgctgtcgcactctgcatggagtgcgtggattgaaaagtccatagctcagtgttccacataattatttacctcctgtcgcactctgtatggagtgcgtagattgaaatacccgcgccgctcaggattgtcgggtactcagctagtcgcactctgtatggagttcgtggattgaaatggataaaattgaacgcaattcatcagctattggtgtcgcactctgtatggagtacgtggattggaatagacctccgaagtgttttgggttttgctatccatggtcggtctcactctgtacggagtgcgtggtgaaatagtgacagaaacaatgacgattagtggattaggatgtcgccctacgtatggagtgtgtggattgaaatagtgatacactaaacatcatgttaagttccatagagtcgcactctgtatggagtgcgtggattgaaagtttcgtttagtttgtattagtagtcttgcagcattgtcgcactctgtatggaatgcgtggattgtaatctccggccataattagcccaccacccttgatttaagtcgcatttcttatggagtgcgtggattgaaatcagcaagtgttgaaggctatccagccctctgtatagtcgcactccgcacggagtgcgtggatttaaactaacaataggttgaccttacctctgctttgattaagtcgcactctgtaaggagtgcgtggattaaaatccgtatctaggaaagtatctttagtgaaattttgaagcactccatatgtagtgcttcgggttaattacaaacggcttgccgttagttttgtaatctttgatctacatcagaattggagcatcgtatgaatagacaagcacctatttttcgctgaattcctctcgttacttaatcgacttgaaatggaaacgacacgtttgtccgcatttctgggttctacgcttcatggtgtgacaggagtgggctaactcgatatgtggaatctgatacgtatgtattcgataatcgccgattggatggagcttcacaagatatcgtcaacccttatatcattgagctatctcggacagagccgatttattataaaggtgatccattatgctttaagctcatcttgatcggagatgccgttcgttacgataattatatcgtggcttccttgactcaggctcattgtttaggaattggagcggagcgtaaggcgttcgaacagtcaggcatttttcatggagatcagaatggattgatttggaaacaaggacaattgcatatgaacgcagctgcaccagaaaacatctctcctcatgccctgcaagaacatgcttcatggtgctctgtacatctgttgacccctgttcggatacgtcgaggtggggcgctggtacagacaattgattttccaactatcattcgaattattaagagaagaattcagttgttgacggagcgttatggaggaaatataaacacggatgtagcgatgaaggtatgtgaattggcaagcgagatgagcctgacgtcttccgggttatatctgaatgagatgcatcgatactccagtcgaaaaaaagaatcggtggattggagcggcatgctgggttcactaacatttgagggggaactgtctccctttatcccttgactgaacactgcccgtattttacatatcgatgtggtctacaggtccatgtaatgtgaagcagacttatccattgaaacaggattttgatgtgagtgaagtagtatatgggctatgaatcctgtggacagagggtatcgccagtggtagtaatgaaatgtgaaatgccatgaagtcatctgaagcaggtgcgaaaccctaagcgcacatgatttccctgggagattcgcacctcgaagtttgtcgaaaacactaattttgagatcttttggcaacagggatattgagtatatatgctgttgtggtatatagtggagttaatatgtggaaaaagtatcggaaatacgtattaaggtattctaaacataacttgatgcgtgtctttccgctgtcgcactccgtatggagtgcgtggattgagatttaactacgttggagtattgctgtaggtcctgctgctcgcactctgtatggagtacgtggattgaaatgcaatcagctcatggttaaaccgtgtcttgggtagtcgcattccgtatggagtgcgtagattgaaatttaccgacaagtgactttgtgctatccgcaaatgtggtcgtacactgcatggattgcgtgaattgaaatactcaccgtaccactgcaggagagtgtttcatctgtaaaaatcacgtcactgagagagcaacgactttaaactgtattgatgtagaatgtactttaacggttggccaaaactttcttactcaaattaaaaagatcctcaaatccggaaagacagaagtcatatagggattaaaaggcgttaagaatggaagatttaatacccgatttgaatgaactattcgtaaaactaggtcacaagaacgtcgcattctgtatgtagtgcgtggagtagaattgtttagcaagtgtccaatatcagaatgcgtatttagtcgaaatccgtatggagtacggctagataatattccagcagcataaaaaaacgttatatacgacttgcttgcacttgccaataggtcggtacctgaagtaaatgagatcattggatcaactacttcccgaataatttctaagctaattatgtctatgcttattttgtgactaatctataaagtttcctaagagacgataagaagaaagcgtacaagatcatctgattcaccctccactattactccttttccctctttattcccaagttcgaatcctaccctaataaagaatgcttgaattcgtttttcatgaatcaattctaatttttccaacaaaatggcttgtatatatacttttttatagtatttcctgttatcaataaatatttgttgtgcaggaatttgtaaataaatgccgaatttagtcaaatagatattgcctaagtccttgtcttaataatttcaagcgattaaaggagggatttgtctatatgaatagtaatccattaaagctgatctttgataattacaatgaacttaataacctgatggtaaaagagattgaattagccacggctcatccgggcttaacaggtagttaccgggaggaaatgtgggtgaagtttttccgaagtattatccctcaaaagttttcttttgttcacggcgcaatgattattgattcggaaggggggatttcgaacgaagttgatattgctgttatcgatgaacaatacactccttacatatttcagtaccatacattgaagttgattcccatcgaggcggtctcgatggttattgaatgtaagagcaccgatctgcccacagaacaattagaaacatgggccaaaaagattgacagccttcatgctaaaaatactggcatcgctagaatggcaaccggatatgccactggggtaaccaatgctactcaatctagaagtcaacccattaaagtactcgttagtatcaaaaagtcggttaaagaccgcaccttaatgacgacaagagaagagcttggagaatacttcgacttcattattcaagagcagatcgataaaacttcagataacacgaaatttgaagtgttggtcaaaaacgagaagaaaacgttaggatggtggggtagacgccttaatcagcatatttcagatgaggcagatcacagtggcctagccctacttacgagtcctgatcagcatcaagctaagaattttaaggaatgtaagatccatctagaaacaaaggcagagcagtcccctgatgggaaggatatcagtatatcttatatatcaaacaagttagaggatttaagaattccaaacaacccgttactcaccttgaatttacagctcaatcaattgctgatgttagtcaataatccgatgttgttcccgcattttgcatatgctaatgcattccaaaatctagttcaagaataatacgataattctgaaatcagacaataaagtgaaggaacaggaaggtgggaggacagacaatggatgaaaaactcttaaaggatctaatgcatgcaagtgcgattgaaacacgtaagtacaatatcgaattgctaacacctttggcaattcatggggcaagaaaagatatttcatttcgtattaccagtgttcggggtgttttgcgatattggtggagagctgtccgagtcgaagatgggatgaatgagctccggaaacaagagtcattgtacttcggcggcacagatcagagctatggtgggaaatccccaattcgtttcacatgggataatgtccagttgacctcaggatcattcccaatgttgcctcaccgtaactctaaggatcgacaacgtggaccacagattcaacaaatgatatctcctaatcagcatgtgagcttacgttctgagcttcgaaaaaaggtgaaggacgaaaaatcacaaggggacgcttttgcggattacattcatcatgtattggaactatttttcatcctaggtagtatggggcagcgttctcgaagaggatttggtgctgttcaatgggaccagcatcaattcatagacgttgcggaattcttcgaatatttacgccatctttttgaaagaattggtcggaaagcggaagttcatctacagaaacagtatttgactttgaatgatctagaaggagaacgtgcgctcacaagaccacatttatcctcagtatgggttggcgaaggccacgaaaatgcactcgagattgttaaaaaactcggggtagcgtcccacgaaagaaaggataagcgttcactaggagggattgctccacgattcgcatctcccttatggtgtaccgtaaagagaattgacgggttatatcacccagtcatttccgaattgtcctcacaagaaacacaacggagtgataattatttcaacgagcgcaaccaatttttgaatcgcatgggagtgaaaactgttggaggagaataaccgatattactgcattttcgggatcggcccggtacaatccttcattgctgcttcgcgtaagttggaagatttgtggggggggagttaccttctctcattcttaattaggcaatctcttaggtccattagagaattgtgcaggcagcgtcagatccagtatcaagtcatttatccatacatttcggataatgagacaaatcaaattgaaaaaaaatcgctggcggttgccaattatcctaaccggatcacgtttacgctggagacttctgaggagaaggcgcatggactgatgtcagaccttgaactgcacgttcgaggtgaattggtccgaatatcggattggtccatagaaaaagtctttcaagacaatacgcacgaagggaaacagcgtatccatcagcttaagcaacaggcagaagaacaagttcaacattttttagaagtgaactggattgcttacccatgttcaattgcttcaccatcgaatcgacaagaagccgaacgaatgtatcactcactcaagggacaacgctctatgcaggttgtagcggaaaaagggattgcttgtacggtatatcaacggatggatgccttgtgctaccaaccgccgttctccggtgaccgctatggggatttaaagcgtaaattgagagatacctggaatagacgccgacatgaattcaagccaggagatgcgaatgatccagataatgcacgcataagagacaatgagtttttatgtgggattagcttggtgcggagggttgcacgcgactttttccaagaagaattcaattgtggatcagatgtgttttcccgttatgaatctgtcgttggtatcggttctaaacaggatggttactatgcggttctgctcatggatggcgataacatgggccaattcttcaatggtagtgaatctgaagttcagcatacgagtgagcgattaggtcattttgctagtgtgacagttccctctattgttgaggagcatgaagggatattgctgtatgcaggtggtgatgatgttcttgcattgttccctgttcaacaggttcttgcagcagcttatcaattacgtaaagattttggtgatccagatacggggttaaacggagctacggcatcggcagctattgctgtcgggcacaaaaggacaccgcttcaacaaatgttgaatgaagccaggacacttgagaaggctgcaaaatcgtacactacaaccagtggtactgctgttttaaaaaatgcgtttgccctatccgttcttccacgttcaggagagtatttaggtaccattgttttaccttgggagaaccatggcgtgctaatgacagaagcattgggacaactcatcgaacttctcggtgaagttatttctacctccttcatttataattttgcagccactttccagagattgattggagaagatagtcatgaagaaccagcatacttggaagaaatggtattactggaatgttaccggcttatggatcgttccgtatatgatcaagaacgccgaatggaataccgtcatcaattagctcaagttccagagttatttcgccaattaaggttgaagggctttatagatttgttgaaaatgttggccttcttcaacagaaaggagacatcacgtgcgattactgaaactgacgccagctgattccttttttttcaaaggtcatatgatgtctgaaatgggagtgccgtctcaatggtcgggtctttttccacctcgtcctaatacggtgtatggtgcgctcaggtctgcttacattcatcaagggagcacgtttgaggcttttcgtcacgaaagcgatgcacatatgaaagaatggatgggaacaccgaaagaaatggggaaatttcggcaacaggctgttttcatcagacaaaatagagagattcttttaccagtcccactggattaccggatttattcgatgattgagcacggtgaagaaaagttaaaagccgatatactgacgttagctccgaaccgtgttttgtctaacgttcgtgcaggttacacgttaactagaacaggcgaagctgcccgtgaaggcaaggataaggaacaccacggtcaatatgttccgttggagcaatggtgccaagcgatttttaagcaagaagagattcaggatattcgctcgttgtctcagatcgtggatggttatatgaagacggggattaagattgatgccgtgacaagtggagcggaggatgctcacttttttcagatgaatatgctgacaatgcgtcaagaatgcgagctagtatcaatcgtctcagagaaagaagctcctgatttctccaaggtgccgatggtgagcttaggagccgaaaatagaccatggttcttagaacaagagcatgtgaactggcaggtttggtcagaagaacaattaaatcaaattgttcaatccttacatgatacaaaacgagctagaattatactgttaacaccacttgtgctgcctgaaaattgtccgttatctcagccagaacagactgaagattggctctgggaactgtttcctggcgtgcatgttaggctgttgacttgggttacgggacgtgcagaattgtacggggggtgggacattgttgcgaatcggcccaaaccgagacagttgatgttacctgctggaacggtgttttatgtaggtattcagccagaagatattacttcactcagtcaggtggctaacggatttcatctgtttggaggagaaaccgagggcagagatcaggaaggtttcggatttgctgtaatagccagtatcaaaccatagtttcgaagtgaaaatgacaagatcgagggggagttcgtttgtttaccacgtttaaaccttttctattatacgccgttacttcggtccatgcgggtagcggaagtgaaattgggatcgtagatcttccgattcagcgagaaaagcatacggcatttccaaagattgaaagctctactctcaaaggtgcatggaaacgtaccgtgtctggaagaatcggtgaaagttctgaggagatagcggatttttcaaaagtttttggatcatccccacgagatgatgagcataacgattctcaggcgagtgcagtatcattccttgatgcacgtattctcttgttcccaataagatcattaagaggtacctttgcatgggttacttgtccatatgtagtgcaacgttataatcgtgaacttactatgttgaatgctgcaaatcaagaaaagatagactctttaattcttcccgtggttgaggcaggtagtgtctctggcgatgcccttttaatcaactccgcaaaaggggaaactagtctatcaggtagcattgtgcttgaggaatatacgtttactgtaaaaagttctgaggacaccgaacgtttagctgagaaattggaggcatggattggtactccaaatggatctattggcattagagatcgtctagtagttttatcagatgatgaatttactgattttgtacaaatgtcaactgaagtcaacgctcgtattcgggtagaagacaatggtcaggttgaaggtgggttgtggtatgaagaaaatatacctcctgaaactgtcttttacagtgcgcttctgtttgggaaaccaagagaatctcaaaaaaaaccgaatagagctggagcagaactgattaaaaaaagcagtttacatacagctgaggatgtaaaaaggtatgttactcaggaccacttccctgaagtgtttcaattaggaggttcgtttaccataggcaagggaatcatgcgcaacattcgattggaaggtggaaatgaaaatgagtgatcaacaaccttctatccaacaaattgaaggcggtagagcaagttatgcttttcaggaagttcaaaaggctgtcaatcaactgagtagctcagaaaaaattaaattgtattcctcttatcttaaacgtcttcctagcatgattcaggttaacgggctggggcaatccatggcattttattattctaaaggtaaggaaaatcagtatgatttgatttatcaatctattagtcattggattatgaataaaccagaactacaaatggagcaaaataaagatttcttaggagagcttgtatccttaaatagtgaacaataccgaagggtgacaacagaagtacatgcattgcttaattggatgcgaaaatttgctacaggtatgtgtagcgaacaggagcagcggcctggggaagaagacttatgacaaagatgactgaaagtgatcatcggatctaccatccgaaggatacgggtgagattttacgtcggaaaccaaaagctgatcatttatggtaccttctccactataatcaagatattagcttcgacaaatacaaaaatgtgaagtttggaaagcaaaaaaaatcgtttactaaacaaacactatcgcaaatgattcgagtggccgaagcagctgaaaaacgtaaggaaagtatgttaaagctgttggagtccagctattattttaagatacttcgtctgaaggacacgtcattgatcctccatggtttgggtagttcgcatgtgaatgaaagcagccttacgatacatcccgtgtatggtgtaccttatattcctgcatcgagtattaaaggagtagcacgtcggtggtttcttgatgctttgttggaaggcgaggctacgaatctggctaccaataaagggattataggcgtgcttggacgagccttattcggaagtgaggatgggcagggaatcgttcagttctacgacatcttatttcataatggattagaaattaagttggatgtattaaccccgcattttggtgagtactatgctaacaaagagctacccagtgacacgaagaatcccgtacctaatacattttatgctgccagtgtccattcagttcaattgatgctgaccgtggataaacggaagcttgctacaatagcatccgagctttctattttacctgagccgttgatggaaatgctcagttattggatatctacagcttttaaagagcttggggtaggcagtaagtcttcgtcagggtacggacgcttcaatcgatcagaagaaatatatactactgcctcagaggaatctgcagaaagtatattgagtaatatgacggaaaaggaaaagttgatttttagaatcaagtatttatcgtcttcggtacaagatattggagtgagtaagagggaaatctatctccaaattattgagtccaatgatactgaagctgcacaagctttgaagaattattggacagagattggagaatgggttacttcaacgaagaaaaaaggttctggtaaacaagctgataaatgtaaggccattcaaatgatgcttttaccgaattagaactgtttatcctgaggtgcgaaccccaagctcacatgattttcccgggaaattcgcaccttgaaatttgtcgaaaacgtcaattttgtgaacttttggaaacaatttttttgttaaaatgatttgagtaatggttataaagaagttttaatagcgaaaagacgcacgtatcttctcattagattaggtaattacgttgttttcgctgtcgaactctgcatgagtgagtggattgaaatcgcttgtagaggtcgataccgtattggatggacatcacgtcgcactctgtatgagtgcgtggattgaaatattgccgagtccatcatgtcttggtccattccgagtcgcactagaatgcgtggattgaaattatccctcctatgttataaattcagtacagccaacgtcgcactccatatgtagtgcttcgggttaattacaaatagcttgccgttagttttgtaatcttttatctacatcagaattggagtatcgtatgaatagacaagtacctattttttcgttggaatacctcccgttactcattcgacttgaatgtaaggaaacgacacgtttacccgcatttctcggctctacgcttcatggtgtgactggttgggcgctaactcggcattctgaatcctataggtatatattcgagaatcgccgatggggtggtgctgcacaggatatcgtcaacccttatatcattgaaccaccccggccaaaaccagtttatgataagggtgatgcgttatgcttcaagctcatcttgatcggagatgcggttcgttacgcaaaagatatcgcgacgtcgttgactcagacacagacatttggaattggagccgaacgtaaggcattcgaactagcagacatctttcatgcagatcagtacggacccatgtggaaacagggacaattcgagatgaacgcagctacaatcgaaaatattgctgttcatgcgctgcaagaacaggcgtcatggtgctccgtgcatatggtgacccctgttcggatacgtcgaggtggggcgctggtacagacaattgatttttccacaatcattcgaagcattacgaaaagaattcagttgttgacggagcgttatggaggaaatataaacacggatgtagcgatgaaggtatgtgaattggcaagcgagatgggcctgacgtcttccgggttatatctgaatgagatgcatcgatactccagtcgaaaaaaagaatcggtggattggagcggcatgctgg

SEQ ID NO: 24 - DNA, 11049 bp, Paenibacillus xylanexedens
  source 1..11049: mol_type = genomic DNA
tgaagcttctcaagaactggaacgtaaaacgactgaactggagatagccaagaaagaagcagatcgtaagcgcgtggaagcgcaaggtaatgcagacaaactattgatcgaagcagaaggtcaagctaaagcaaataaagagcttcaacaatcattatcgagtcaactcgttgaatatgaaaccattaagaaatgggatggagcacttccatatgtaagtgggtcaagtacgccaatgattcaattgccgactacaaaaacagagcaaaatagcggcgcggggagcgtaactccctaattagtggtttgaaatgcacgccttgctttctcatcaattgaatgtgttgaattctaatgaacaagccggtccaatcgtgggctgacttgttcattttgagtcttttcaaaggtaccatgagggatttagttaagccatggcattggattcacctgtccaatcctgtacaatggataacgacaaaaacaacggtagattaaggatggattagcacgatgagaattatcatatcaccagctaaaaagatgaagattgataccgatcttatggctatcgcgcagatgccgcagtttataaacgagtcagaacagctattgagtctgcttcaaaagttatcctatgacgaactcaaagcgatgtggaagtgtaacgatgcaatcgccgaacagaatgtggagcggatccggaatatgaatataaaagcaaatctgacaccagccatctatgcctatgagggcattcagtatcagtatatggctccgggtgtttttcaaaatgaggaattagagtatcttcagcagcatttacgcatattatccggtttttatggcatgttgcggcctttggatggggttaccccttatcggttggagatgcagggcaagctgcaaggtccaggcttcaaatcgctctatcaattctggggtagcaaactcgcagatcagcttcaatcagaaagcaactacatcctaaatctggcttccaaagagtatagcaaaaatatcactccttttctgagtgaggaaacccggttcattacttgtgtattcggacaaatggtcaatgggaagcttgttgaaaaggcaacctgggccaagatggccagaggtgaaatggtacgttatatggcagagcataagattacagatgtgagggatgtaagaaactttgatcggttgaatttcgctttttcagaagaacgatccgacgagagtacgtatgtattcatacaagcagagggaaagtagcctgctgtgcgctgatcatgtaccagaatgataactatttgattcacttaaaagtcgccaactggcggcttttttatttttcaaatattaaatctaagtcctaatcaaaataggaatctattttgtatcaggataatgacaggttatattttaaattgttatctgagatataaaaggaaaaaagtcccttaatttagggactaatttactatgtcctaaaataaggaaaatgacgataatgacttattaggctccatttatacatctgttgagggaggaaatggagaaaaaacataaaggaggaatatgaattccatgagtttaagaaaaggttttattgtttttctgatggctttgttgttgattggaaccatgtatccgactagcggttatgcgctttcggatcaatcggatgccataaaaacaactgaaagtagcgcggagaatgttgatgtttctatggaggaatcagctttaacagacggcgagtatctagatgttattgatccggatgtctacgaagaaccagaaggtgtagacgaagttatcgaagaaacagaagatgaagcgacggtaactgatgatacatatggggaaaactctttctctcctcaagctatggccatggcagatggaactttgaccatgagtcccggagattcctatacgttcacgaataacggaagtgccgcaagatcgttaagtaccaatgccgcgacttcaagaagcagtgcatacgattacgttatttatagaccagatggcagcatcatgagcgaaaacatgaactctattagcagtttatcagtaggctcaggctatacagctgtaatcacctctacgggtcagaatccgtttacagtgacaatccgttcagaattttcttacagtgtatcagctaacccagccatgcttagggttacgttatccaaaggagagagctatcgatactttaatgaagggacacagtcaagagttctaagtgccgatacttccacagctcaggacaggaagatagattacgcttcatacaaagaagatggtagtcttgtagcttccaatttcgaaacgactgggaaaccttcacttgcgggagggaacgaaatcattattactggagcgggctcacagcctgttagtgttggttttccctatgaagtctataccggtgaatggagcgatgagccagcctatacgcgtacaacgctatatcagggagatagctaccagttcactaatatcagttccaaatccgatgcactccaaacggatggaacgaccaaagataagcatgattacgttgtttatcttccggatggaacggaaagttctacagggacgaatacgaccactaaacctactgtagcagcaggaagaaccgccgttgtaactttggttacagcaacgcctgtaacatatggtgtgccctatcggacatttgatgtccaaaaagccggtggcgatgcaattactcgaatcactgtatatcctggagaatctatgattttcagtaataatggttcgttggccaatccgataaaaaacaatgccagcagtaccaatggagccctttttgactatgttctttatacagcagaaaacgtcgttcattcggatggattcaacaaaaatacaaatccgatcattcgttcacaaggttacgcagtcgtgactgtagttgggcaagtcccaattgagtttagttatacggatgatttctcggttgaagaaagcatggaacctgcgtaccatcgcgtaacactcaaacagggagaaagcgtgacattttggaataacactactgatcgggaatatctcgacagtgatgcgtccaccacccaagggcggatttttgattacgtcacctattatccagatggtacagaacggagtacaagaaaagcaacaacggttgaaccagttgtttactatggaaataaagcagtaatcacaggtgtatctgctcaacctgtaaccataggggcgatttacaccatttttgatgtagaggatcgaccaaatgaagcactaactaagattacggtatcaccgggtcaatcggtaaaattccataatggaggctcactcagcaacccaatacggagtaacgccaaaaaattaggtgcactgtttgatattgtggtgtataaggcagacggtagagcacatagtgacaaattcaatagcaatgtaagtctcgctaccattccttctggtggtgaagccgtcgttaccgtagggggaagtacacctgtaatatttgaatacacggatgatttctctgtcgtggacagccaggaaccggcttatctgcgcgtgacgttgaacaagggcgagagctatgccttcaccaacataatctcagatccaaaaaggcttcgaaatgatgcttccagcagcgcgggacgggtgtatgattacacgatttacaacgtagatggaacagtgtcaagcagtagaacagcaacagcgatcgaggcgtatgtcttgggtggtaaaaaagttgttgttaccaacatctcggatcaacccataacgtatggtgggatttaccgcgttttccgtggacaagatgatcaagtcccttcaccagaatcggaaatcactgttaaccaagggcagagcgcagtatttacaaatccgggttcggaacctgctcagttgaatcggattagagcaaccaattccattgtggattttgtggtctatgaaggaacagataaatatcggtatctaacagaaggttcaagtcttgaaacatgggaagttccagcgggtggaacgcttgtcttaaccgtagtatcttcagagccggtaacgattgagtatgacattcctgtgacagctagtcctagtcaagagcctgcactcatcaaacggagtttggctccaaataacacggttttattctccaacacatcatcttattcagcaccgctcattacatctcatgtagaagggttgacctatgattacgttattcggaatcagaatcaaggggttgttagggaagggaagaatgcgataggatcacaaaacatacctgggaagtttgactttcaggtgcataatgtgtcatcccaatcgctgagatttgtaggtccttaccgtaactttacggtcaaggaattggaagtggagtttctgactttatatgaaaacacagagacggcgcttccgacagctcagcaagggaatgtatactaccgttttagtccgtatagctctgacaagtatcggattgccattaaggaatcaggtgatttttccattgaacctcggatcgaattgtattcagataaggaattgagcattccggtagctgcttcaatagagcaagaacaggtatatggtgagcaatataccgttcttgaatgggagcttgaaggtggacagaattattatctcaagctaagtgaaaaagaaggaaaaccgattcagggagccataaaagcagcatggatgaacattcgtaatgacaatagctatgagtacggctatggcaatcaattgcttaaagtcgttctatttacaggagatcaaattgtgtttgagtatgatcgcaacggtaatttaacgaaacgaacgaaaaagattttcccatttaattaatgattgtctaaatctaggttgaggtgatggagtgtttaagaaaataacgattatttggttatgcgtcatattggttcttagtgggttcggttcttttggatatggaggacaagcagcagcggcggcagaaggtagggattccctcccttccgctacctacattacaatccatagtttaaaagagcaatttggtatcaaagaagattggattgagaaaaaactagatcaaggttactcgctgtaccaattgtataaagctttacagacagatcgcacaggcggcgaggctgctgaaaaatggctagaagcacaagaaataagcgaaccgattcaaatggaggggctacgcccttccggatcatcacagcaaaataacttctcaattaatgctcttaatgaggatgctccaggtacaggaacaaccgtggacgaaactggacttaaccatgtagatatccgagatgacgcatcgctttatatgacgtcatatggagcagaatccatctcaaccgctacaggggaaatgatgattcagagtactgacctttctctacctggtctcattccgtttgatctgacacgcgtctatgacagcgctagagcgagtggacagctgggcgttgaatatgacgaaacgacacagacatattccaatatggttacgccacgcaaggaagaactctctgctggattggggcaaggctggcgttgggacattcctttcatggaaaagcgtggtgataatcaatatattctgattccaggcgtgggctattaccgcttaaactcgaacctggaactggaaggttacgtatggaatgacttaaccgttaagcgagatgcgaccgtgactgttgatggcgtatctagcagttatcgtctatccatccgtaacggctatgattatctatttaatgaagccggagaacttttgcaaattacagatggctaccgcaatagcgtgaattttcactatacgacattgaatggaaaccaagccattgcaagaattgaaaacagtgaaggtcaggcgctgacatttgcttatgacaacctgaaggttactgtacagcttgccggaacggatcggaaagcaacatacacgcaacgcgaggacgaaggcattcgcattttgcgagaatacacggatgctctcgatcggacaacgacgtatacgtattattatccggaatccaaattcaactttttacctgagttgcaaagcaaccaaaatgctcaaggtgtgatgcatacagcgctgttatcgcgtattacaagcccttcatcggctataacggattatgcctatattccggcgctgaagcagatcggcgaagcttcctcccatttcgtattcaaagtaagagaacgcaagagccagtttagtacaacggaaggcgaaggcgttctggacaaggttaactttgaatattctggagaagacctggaagcatacggtcaatccacatcatggacaacgaaagtgaaagcagagaacactatagatacttggacgttctccaaaacgtttagcgctgcagcgcatccagatttggtttacgcagataagcacacgttaactggagatgaagtaactttttccacggagttccagtacgacagtcaaacgaagcgaaaccttccgactcaaatgacggagtgggtaagcgagggtggccgttcgggcgaaaagctgataacgactatcgcttatgatgccaacggcatggtgacttccgagaaacgtagcacggggcaagaatcaacctatgcttatgaaacgggcaaagctccatatcactggatcaaacctatacgattcactaccaaagtaaacagtacgttggaaaggtacgctgaaacaacatacaacaatcaaggtgatatgttgcagacctccaccaaaaatggatatggcggacaattgctctctgattcggaagtgaaacttgatgataaaggacgtatcatcagctcaaccgacaaaggcggtacgctggccaaagatcgtattgttacattcagctatcaaccaaatgcagggcatttaatggaaacgacatcaatggttgtgcatgatgctgctggtaaagcagaatctcttgaggagtcttatagttatacgcctgcaggtgaactggagacaacgacaaacgctgccggagaacaagaagcgaatcgatatgaccttgcagggcgtcttcttcagaccaaacatgcagatggaacacattcaacgacagcatatgatgacaaaaaaaacatcattacaagcacatcgccagacggcattgtgactacacagcggtacaatccgttaggtttgctcatggaagaacaaactgcgtacgcgacatataaatatgcctatgatggcgaaggaaacgtgaaggcttcggaagatgccgaaggtaatgtgacgagatatgtggtcaatgcgtttgggcaagccacggagtctcaatatccggatggaactacagataaaacaaccgttgatcctgtcggaaaaaccgtgacgtatcaggatgcttccaattacaaaactcgtgtgaaagtggacttgctgggacgtactacggcgctagaagaataccgagagggagcctttgtaccattgcaacaaagcgagtatgacctaagcggaaacgtgactgcatccattgatgggaatggggggcggacgacgtatacgtatgatgcgcttggtcaaatcgcaactgcaacaacgccaaaacaagaaaccagccgttatttctatagttatcagggccaggtaacccgaattgtatctgccaacggacaaacagttaccaagcagtttgatgaattgggccgcattattaaacagataccaccgatgctggatggatctgcgacaaccttttattatgataaaaagagcaatctgatcagaaagcaggatcggctcggaaaaatcacggaatacacatataacagcgacaacatgcttacaggcttcaaaggtccggatacgtccgtatcgtatacgtacgacgaaatgggacgtagaacgtcaatgacagataatcacggcaaaacgacttattcttaccgtgatacggacggtatgctcaatggattgaccttcccggatggaacccagttgggatatgaaaacaatacccagcagcggttgggatatacactgaccgatgcacaaggacaatctttgcggatacatggtgaactggatacgatgaaccgagttacttccatggatatcatctcaggagtgggaggtgcttcgacactcgcagtatcggctcagacgcctgtagaccggatgacttttagctacgcgtcgaatagtttgctagaaaatgtatcgtttggcaaaggcctcagcacaagttatcagttcgacggttatgatctgtcgggaatcaccgtttcccaaggaacgactgcagttcatcagtttaactatgagtatgatggaaataaaaacatcatgtctcgaactcaaaatgggtcaaccgatcagtttacgtatgatgaactcagccgtattcaaacggaatcaggcacgcagcaggagacatatacgtacgattccaatggcaaccggtatagtaccggcagtggtaagatatatggactgaaagatgcggagtatacgtatgacagtcagaatcgattggtcaaagcgacgggggaaggcaagaccattacgtataactacaacggggatggactgctgtatgaacggaccgaaggcgaacaaactttccgttattactacgatgaagaagccaaactcatggcggaagcactagttacgtctggaaaagcagaactgacctatgtgtatatctatgacatgtatggtcaactgtgggcacgtcaagccaaacaaactggaaaattggaatattaccagtttaatggtcatggcgatgtagtcggacttgtggacgacgctggtaaagtgttaaacgagtatacgtatgacatctggggcggaccactcacaacgaaagaaaccgtgccgaatgtacttcgctattcgggtgagtattgggatcagacagtcggacttcaatatttgcgagcacgttggtacgacccaggcatggcaaggtttattggtgaagacacttatgaaggtgaactgaacgatccgttaactttaaatttgtattcgtatgtaagtaacaacccccttaagtatgtagacccaagcgggcatagacacgagtcaggttcaggaggaagtggaggcaatgatttcggtttctggcaaaaagaatggaatgcgttcaagggagcacactccagttggtccggagcaatcgacttctggacgatgggaaccgtcagctcattaaatgaatattaccgggtgtccatggagaacccctggtcattgcaacaatttttcacagcgggttatttggttatggagctgaatccttatggaaaggctacagcaaagctttctaaaaaaggtggaaaattcgtagacaatgctattagtaaagcatgtaattgttttacagggggtactaaagttcaaacagaagaaggggagaaacctatcgaggaaatcgaggtaggggataaggtgctcgccaagtctgatgaaaccggagaagttggatacaaagaggttataaagctattccaaaaacaggctgatgaaatttattacgtccgtataggtgatgaagtcattgagacaactggattacatcctttttggttggatggaaaaggttggactcttgtacaagacctaaaggttggagatttgcttgtttcaagtgatggtactaaactagcaatagataggattgaaatagcgccacaacaaaccactgtttacaatttcatggttgctgattatcattcttattttgtatctaaccttggcatatgggttcataactgtacaattctttcagcaggtaaaaatttcaaaaagcattatctcgatcataaaaaattactcgaaaacgcacttggaactaaatataaaaagtatgatgacgaaacaactgcaagatttttaagtgatcttggaagtctgattgataatggtacagtcaaatttgtaggggacgctactttacaaaaaggtggagacgtatataaggtttatcgaggtaatggtttgacaatgactacaaaacaaaatggtgaatggcatactcttttggagtccggaaaagggatggatgggaaattcatatttaaataatatagagacgggggacacatatgtatttagaagaacttaaaaacatagttcaaaataacttattaagtagtgtttatgtaacaggtattgttctatcatcagaaagagaaaatgaacttgctgagttcgtaccttatagaagttatctgttttttgaatttggtgatcaacttgtaaaaattgaagcgattgagcagtattcaaaaatttcaattgcgttaactccaacttttattgtaagggttgaggtagaggatgttattccggctaaatccaatattagcgacattattttggataatagcttgatagacaacaaggttagccaaattgagttacttaatatggaagtaaaaagcaatgagattatttgcgacgctctaaaattatcaataacaaataacactaacaaacaggaattatttttagatcctcaatttttcggtataaatataggaggatttggtgtagaagaattatggaagtacaatcaattggaagaatacaaatcaatatcaacgattattgaattttaaatgatcaaatgtaagttcattgaccttggggcgttaatcctcaaggtctttctattgtcccacccagagcctaatgagtctaggggcatctcccaaaagaacttaactctcaatagtggttcgatcttaagagtctcacagccttaaaacaagccggatcgcatatcccttttcgatgtagaaattctagggctataagaagcggtgctggatatcattgaaacctaatacaaatttacaaagtatatataaaggaggatataattagttaccatttataaatttttactcggttacatccatagaggggaggacggatatgccatttattgggggaattattttaatttttatcctagcatttattctatggtcattaatgttcccgttattcaataaaataggtagtat

SEQ ID NO: 25 - DNA, 7519 bp, Paenibacillus xylanexedens
  source 1..7519: mol_type = genomic DNA
agttattcagtatcaattgatcccatttaattaataaataatccaaaattccctcttcatcagaagcttcttttaactttaataaattaattatgtctgcatcttctaaaaaaattatatagcctttgaattggtgaataacatccttgcatcgtcgtagcaatctagtgtaatcattaatttggcgacacaagagaataccaaaattaccctggtttggtccaaaccttcctagtaattggtcgatttcaggattcttaggatctgaggagtaatttttacattcaataaataccttagggcaatggatttggtaacgatccctaataaaagagaaaaaccctgaattatcaaaattatcaaaagttatatctactcttttccttccctcatttaagtctatttccttttttcccctttttaagttgcctttgaaaatttgtgttaaacagtcataaattagatcgtgataagctctggcattttctttacccgtaggtgtgccctccaactgtttaataagcagattggctttaataggattagaagtattatctaatggtgagctttgttttcttacaagggatagtaactcagcaaaatcagattgattgatatttgattgattctctttatagaaatcaaacaatgtaattatgtgatatggattaggctgaatattctgttcctccataaagtctgttaaataattaagaaggtctgctcgttcatcttcggattttgagttgagtgcaagttctttaattaactcgattatagaatcccaaatctgctcacgcaattggaccgaaaagggagatagttcttcaacgtccggtggatataacagatattcgataggataatctctaacgaaatcttttttaattcttgccaaatttgatataaatattttaccatttccaaatgcctcatttaacggtgaatgctcaatatcatctagtcctatatcatcaaaaatattgcaaccatcaaattccacagcagcatattgaaatccgtattcatcaatagtagagtaaacagggcggtattctattattccagattcaaaccaaaagatacgatcaccttttgaacggtacacatattgaaatctcccgaaagcggcgccatggataccatcttttaagataaatcccttttcaggaaatagcgttacatggttgagtttattttttggttcttccttacctctatctcgatgtaactgaattccttttagtaatttttcatctgtattttctgtcatttcagcaataggaacgtatatattttttgcaatttcaccgaagatttcatgttcaactaatacttgatgaatttcttttaattctaatttattaatattaggtttatttctccaactgttttcaagaattctactaataaccccttgtgttagtttgtctggttttaaataattatcggacataatcatattccttttctaatatagaattatataatattgctaaacttattatacttttgtaacattcaaacgtacaataataatttaccagtgttgttaatctgaatgttacataagagagagaattgtacaaagcatgacaactatgcaggatttccagtggatctatatgttgcttcagtggatgagggtcgtatgtaagcgatcctgggtactctcaggagaactcattaggttgtaatgtgtggaaacccgactcggaacagcggtgtgttttatgattatccaatagggaccgagcagattactatacgcacaaagttccctgtctgagcagtcctcgggcaagtaaagaaaatatagagatgcttgaacgtaaatacgacaaaggatctgatgtgtgcgtgtcagggttgaatgggagttcccgcgcggagatcggatacatttattgcatttagaagtggctgaattcgctaagaacgaggtcaaggtcgaaggtgttggtcataaacttatcattggtgtggacgttgctcgttttggagatgatgaaacaaccatatacggacagattggtgggaaggtagtgaagagttatttccatcataagcagggtacgatgacgactattggctgggtattacggattgttgatgatactaggtcagagcatgcagaagtggatgaagtagatatcagagtcgaagataaaggtataggtggagctgtgacggattgactgaatgtgatcaatgatgagaagtggctcggatacactatcatcggggttaacaatggtttgtcgacagaagatgcttattatggaaatctcgggtctgaaaagtgcggtcacattaaatctttgttagaagtgaatatgagaaattatattcttggggttcctgatgtccttgaactgccggaagatgagaaatgggtaacacagttaacaagccgtaaatggagaatgggcagtaaaaagagagtttatctggaaaaaaaagaggatatgaagaagcgagggcttcagtctccagatagagcagatgcttttgtattagcttttgcctgcattcaagcggaatctagatttgcttttggttagttggctgttgttattcgaagtgatataatgatagaaaaattaggaagtgttctaatgaatatttcaaaagtcgtaacactgatataaatgaaataacaacttccgttctaaacaagaagacagtcttgaattcagagtatgaaatgtaggttttatttcaaatcttcctcttttcgtagaaataaataagagtttagtaattcagattcatgaagtgccacttttaaagcaactggagataattatttttatgcaagtttcccaaaaatttgcccctaaatgcatgtatacagctaaaccagcagatcatcttttcagtattttgattaacaccgatgaatacaaagaaaacattgaaaactcaaaagatattgtagtgagtatatactgtcaagtaacctttgtaatattgccattcagtttaatggatgatttaacagttattccttatcttagacaaattcagagaaagaatctacttgagaaaaatcaaattgcaaatcaatggaatttcggaaaattacgatcagtaaaataactcaatttgaggtggatcggaagtatgaattatatatcgccgtctattaatctagccagattcacatgtccattttgcaatacattagcccaacaaacttggtcaagggttagactgcttgaatatacaaatgggactcatggattttcactcgaaagtagaaatagtgatagcactttaattagtgcttctacgtgccaatcttgctttcgaaaacatgtttggttagacgatgtgatgattgatccgtcttcatcaggaatacctttgcctaaccaagatatgccaggagacgttttaactctatattctgaagcgaaagaggtttttaataaatcacctcgatcttcagctgctctattgcgtctagctcttcagcacctcttcgtacacctaggtgaaaaaggggaaaatataaatgaagatattaaaaatcttgtgaggaatggtttggatttaagagtccaaaagtcattagatattgtgagagtaactggaaataatgctgtacatccaggtgttttagatattgttgataatagtgacatagctgcaagactattcggacttttgaattttattgtagacgctatgattacacaacccactcaaatcgattcatttttttcggaactaccagagggttctaaggaagctatagcacgtagagatgcgtaattactatttcaccagtcaatagatttttttatttattaactaggaggttgataataatgaaaatcactggacttaataatattgaaaaacagctcaaaaaaattagtgagaacgttaagaagcaggttgaaggccctgttagatttgatgagatgtttaacacaacgttcatgaatgagaacactgattttggtaatattaacgattttttcgagaatagtccttttgaaatgaaaagtcagctggatcttgaaaatattaatgaacgtgagttagatgattatgtagcagctaatactaaatttaagttgtggtccgaaatgaagcaagcggctggagtaatctatgttaaaaataaattaaataagtgaaatccgtagtatttagcgcacaaatccgatgatattataattccatagaagtatgaccaaagagagaaggtaaggaaagatttcctaccttctttttgttttgtcagaaagctggtaaccgattgagggtaagatcatgattaatcaactggcagagtgaaaaacgaaaccgaccgaatgacagagagttatccttttccgtacggagtaaggatgcgtaagggtaataaccagccagcacctaaactcactacagcaaacttgaggaagctgtctgagtcacctataccgataagggcaataacgtcatcaagaatgggacaaccaaactgatctggtcggtaacagctgtcgatgagaatgaatctgaaagatgtcgtattgaacactctctcttgaagtccaatcatggattgagtagcttgtcgaggacatgcttttacacagtgctggttcttcggaagttctttgagttgtagatcctcgcagaccattcagaatgtcctgttgatacgttttccctagatttttataaggaatgggaaggatatacgcattaatccaatgaacaatagatcattttctctttcgccacttgagataatatgggggtcgcttgaaagtctcttctcagctcatcaatcagcaggaaagcaaactttaagtgcaagcatgaggagatcaatcaacttgagcaagaatgaatacaggggtggtttactagaatttaaattccattatgcggcatctttaaaagatagaaaccaaaagaggatattgatttaatctattctaatggtcaacgaaagatgaagttcttgatgaacaagccaagatagcgttgcctaattagcatggtgatttgttaccagtttgagatggaaatccattgtttatctgatctatcctgctagtgctcataccaaaacatgagcaatccacaactaaacgcaactagaggccagttttctccctatgaccttatctcgaaagaatataaatatttacctcttgcataaagaacgtatgttcggtttataatatatacaaacatacgttcttaaatgtacaggagtgatttcagtgttggctaagcagcgaaccattatgctcattgatatgcagagcttttatgcttcagtcgaaaaggcaaaaatgcctcaatacaaaaatagaccattagctgttgcgggagaccccgcaagacgctctggaattatccttgccgcttgtccactagccaaggcgaagggtgtgtctaccgcggaaccactctggcagtctcttcagaagtgccctgaactgatcattgtgagaccacacatgcaagaatatatcgaagtatccactcaaatcatgtccattattgaagagttcaccgatctggtcgaaccgtacagtatagacgaattattcgctgattttacagggtctatgcatctattcggtaatgatccaatcgatttggccaagcaaattcaagacaaaatctataatgaaacaggcgtttacgcaagagctggcattggtgaaaacaaaatcatcagtaaattgtgctgtgatatgatcgctaaaaaagcagaggggggtattttccacttaaagaaagaggaattacacctccacattggagataagcccatccgcgatatgtgggggatcggctcaagaatggaaaaacatctgtggaagatgggcatccgaaccattagagacctggcgaatacgcctctttccaagttaagaagtaagtggggtgttaatggagaagtcatttggcgagtcgcaaatggactcgacaattcgccggtaaccgtcaacacgcacagtacacaaaaagatattggaaacggaatgaccctacctagagatttcacagaggcttgggagatcgaagtggttattctcgataatctgcacagaagtatgcagaagagcccgcaaaaagtgactgatgagcagtgtagtatccgtaagtgtatctggagcggattttgaccaccccactggttttcacaggcaggttaaactgtctgatcctacaaacataaccgttgatgtatgcaagatagccaaacgcatattccatcaacactgggatgggcaacctgtgcgccgtgtaggcgtatccctttctcaattatccaacgcggatacatatcaactatctttttttgatgatcaggagcagaaacaggccattgatcaggtgatcgctagtaaccacctggcgattcatgaatttgcacaaatttggtttgtggaggagaatgaactttatttatctgcggttcaatatgtaactaaatatctgaggtattattaatagcaagcagtttgataagtacaaagccatacatccggatgccaagccattgaaatacgcaccagagatgaaacgtcaatggaagaatacgctggatgaaatcattgtgcctttggaggatgagttgcgctaaatgtcatcacgccgcaaaaagtgtagtccgggacaaaattaaaatttatgcaccattcaataataaaaataaaaacccactctgtttctatatatagagtgggtttatagctttattgtggaagtttggcatctactgactttgtacccgagataatatcagtaactaaagactgtgcgttgttactataactgcttaaactacctgatggttgtatagccaaatcaatatatttttcatagttgttatacaaatcaaaagtttcatcataaatagattgatattcttgaggaggcaaatccaacttcttaattgtattactaacttcgcttctggactgttctagagtccctatatcaccttgtttttcatagtactttttagcaactgctatagctacgttgaaatcgtgaactcagaataatcgttgtcttctaatagttcactataattgacctcaccaataatggggttaatggtagaattgtttgcgtttaattcttcagcaaattcctctaagtgaactccgtcttgtatagcttgtaaccacaacttagagtatgtccctgtgagttgctctgcgactgctgatgatgaaataatatcaagatttattgatttaacactttctacgtattttgacttagcttgatcgaccttatttttagcatcctcattattcggttcttcatttaatgctttctcgtatgccttgaacgcttctccatattgctcattgctaaacttttcatcaccctctgaaatatttagttatcactaatggtatacctttacggatagctcaaacgaagttttagatacaaaaaaaccacttactttcgcaagtagcatttaaccgttaagcccatggagacgataatgtatatagaggggtgttagagcaccaac

SEQ ID NO: 26 - DNA, 3913 bp, Paenibacillus xylanexedens
  source 1..3913: mol_type = genomic DNA
accccaataatccttatcacactcaatcttttgtacagaatcgcaagcagttggaaatctgctttcgtataaagttccgttaacttattcgcctcttcctgccaatcgagaccacactgtaaaaggtaatctgtaaaccattcatagtgggacgggttgattggattcgacaggatcagtcttttatatatcatcatcacacataggatcggcagaaagaatcttgaaactcaacattaatcgtttctaataaacgatcagcatggtcaacgatcttttgcgattattgactctcaatctcactgatctcactatattttttatttatccactctaatgctaattccgcttcttctttcaagataacacctcgctggcttttatactgaaagttctcttttgcccacaacaataaaatctttacatattctaatgtctcaatttcacatgtactgtcctcttcatcttcttccgcaaagatatcttcaaaagttgtaaaagacttgtccgattttattaagttcacattccctccaccttcgtataacgttattttccctttcagtaattcgattaagtttccgatctcttcctggatcgtggcaaagtcttcaaatatatccgatcccaaagaattactaatcaaataaccattctttaatgatgaatcgatgcctaagtccacgataacttcgttgaaatcttctttatattcgattgtatacctgtatttaatcatgttcgtatctccaatcttcttaatacaacggataagccgatgtgatttgctcattttttataacaaattcaatagtcactcctgtactggaagtccccctatatctattatttttaaaaagaactttgttatcgaatgctatatttatttcatcaattacttgttgtggtgtccaatctttcgaaaagaacgtggtcttcgctttttttagtattccatctacctctacattggctctatacacaccatactcattaggaggatcaatatttccaacaactttccctttggtatttggcataccttcataatgaaatccaaccgcttgtccctttattatttcaccctcgaagatatgattcaatgcattacttgtagttccttttttaaaaacctcagtattctttaactcattgattttccaactactgtgccccgtacccttaatactccccttttgcccattcgctttcctcgcctcagccgcttccaaattctttttaattttcgccacagctggatgagaagaaggtagccgaaaaggtcctttgccacccggcatactcccgcgaaccatctgaaatgccataaatagttggctgaacttcagagaagtcaacatcatctgagcatacttatcggatacaggctcgcctgtgaagggatgaattccattttcaaaagctttgatctgcatcgcataaatatcttcccctggcgcttcagcatccgtagcttgcatccgattaaaatccaaatgcccctgatccttcttatatgcctgcaaggctgcctgatccgtaacaccattctcattcacaggcatccacatcagcttcccaaacatattgacttgtgccatccggtagcccttatcatccgagccggcataatatcttgaggtcttcatcattactcccgcacctagagcactaacagcactgccaagactcactttttcagcatcgacattctcaaatcgtgtggcaatatccttcaattccttagaggtgttcaccatactttccagcgccctctgcaatacaggacgtgaccgtgcaaactcatcataaaaacgctcctgcgtcacacccagccacatctgctgaaggaacatgatctgtcttgtgagatccttccgtatatgttccaattgttgtctcgcctgatccacctgattcgatacgtgatgtaactgttcaggggtaactttaatggtattcatccattttcaccgctcatctaagatatgataaaactatgttagcagaagtttaatggcaattacatccggctaacctcctgatttcactgcatgaatccacgctcagaatgatttatatccgtccctcagccccatacgatctctatgtaggtgtatacatgttccagagggttttccttttacgactacaggatactgtggcattttactgcgacaagccgaaaactttaacaaatcatagtattaatgaagaaacttgactcgtgcggatgattaggtgtactatatgtttgtataaatggaatatattacaatttaaatatttattttggaatcttatattttcaagaggtctatccgagcctatcatatctttgtctgcaacacataatcattggcaggcattcattttacatatacattcctacttcatagagttttctagcctgtagagttctacctccttaatttctttttcagtaaagaaaaaaggggaagaaccatctttaaaagagaggagggcaagaggatttaagctgcaagcaggtctatttgtcgtaaccgcatgtttttgtaaaagaatacccataacaagaaaggtggaatttattgctatgagaaaattgattagtttagctcttattcttgttctagtgctttcatttaatgtagctgcctatgcagacggtgatgtgactcaagccaaacctatgacaaaggaagaaattattaattccaaagaattccatgaagctgtgaaagcggctaaggctgaatttgaatcgcagaaggctgataatgcgggtggtccagttctgtttgcgcctgctccgaaagtatctcacattaatgtatacggtgtcgtctctccgaatggcggtcaagaaatttacggcttcaataacaacccactctccacgaccaatgatcatggtggggcttggattcagtgtattactttccaaattggttatgacagcagtcactacggcaagctcgccggcaacacaatgacaaacaactggtctgaagctattgatctggacggtgatcgtgtcgttgatgcttgggcctattcttgggtttatgaagcgcctagtacaggtggacaatttgtaggtacggtctattccattaatattccaacacagtggaccgcttggattaatgttcgttaacatgaagggtctaatatgaatattggaggaattggctatcctggttctatcatgaggaataagggaagtaagcccaaaagctcatcagctttggatacgaatcggatcgcaccctaataggaaataatagctcattcttctgctaacaattacgttagcttgatcaggcgcagggacacgcttccctgcgtcttttctcattgtgacgttaccctaagagcagtagccgagcaaaaatgccaaggcaatgccgagtatctttttgccacaacaagcctgaacttgtagcccaacaatgccacgttcgtactactcttgaatccacattttagactaaatgaatccagtgcctcttgtcgtacctctgaaatgcatcaaaaataaacaagccagcccacgattggaccggcttgttcattagaattcaacacattaaattggtgagaaagcaaggcgtgcaactcaaaccgctattagggagatacgctccccgcgccgctattttgctctgtttttgtagtcggcaattgaatcattggcgtatttgacccacttacatatggaagtgctccatcccatttcttgatggtttcatattcaacgagttgactcgataatgattgttgaagctctttatttgctttagcctgaccttctgcttcgatcaatagtttgtctgcattaccttgcgcttccacgcgcttgcgatctgcttctttcttggcgatctcaagttcagtcgttttacgttccagttcttgagaagcttcg

SEQ ID NO: 27 - DNA, 3655 bp, Paenibacillus xylanexedens
  source 1..3655: mol_type = genomic DNA
aatcggcgttttggtcaggttggtgccgtttgttccattaacgtcaaccacgatctgctcttgtttcgttgttggtgaaggtgcagacgttactggtgtagtcgtggacgatccaccgccagttgatggtgtaggtgtaggcgtaataataatgatctgatcaaagaaacgatcgaatgctgtctgcacttcgctaatactgctgtatccgttagcaggcttgcgatcaagcatccattgagccagttttcccattcgagtatcatcttctactagatccttcatagcattcaacttaagtaggaatggttcgaaaggctccatcatctcagtagattgctggaagctgtatagcatcagcatggctttcttcatctcgctaacgtctatagcatcattaatgtaggaataattcatgactaacattaatgatgcaccgtaaacctgttcgattgaaagatccgaaccctgaaacagacgttttgcagtataagcaagtaactctttatccacattggatgcatttaaatatttttgacctaactctttaaacatttccatccctggatattcaaagtactctgttgactcaacaaaaagggaatagaactcattcaaatgctgttggaaaagaatcttgtctgtttgtttgatcgtctggatgcctttatacccaatttctacagcatattgcacttgtttcttaagattataggtatagtcactcggtaaaaaggtcattaccacattagctatggctttcttctcctcaggttggagagtgtcaaagccagccggaagatccaaccattccggttgagtaattgctcccaggatagcatcagtattcttcgtagctctcgcttcgttgataactctcaaaggatctgctggattaaagaactgatcaaaagttttttggatgtttttatagttttcataaccaccgactggacgcttatcaatcatccattgggcaagttttctatatgtcgcataatctatgctatctactttgtccatgttaagcggaaactctaccatatatttgatagtactagggagattgttatactgtgttgattccttctgtactaaacgaagacgcaccaaagcattatacatcttggtttgattagtcacatcattgattgcattgtaagtagataacgacgtagaaagttgatctctgttctgataagaaggaatttcatcacgcattgagtaaaatttcatgcggtatgcaaaaatttgtttatctacaacagacaaattttcatacattttccctactttatatagtgattgaatacttgggtcgaggtttatgctaaaaacttcaggtaaatttaataatttagaaaaataagcattgatattctcctcaacatcagtcagtgcaggtttattaaagaggtttcgtggttctacagccatatcgagtacatattgtacttgtcctttactcacatatccttttgccccattcattaaagtgacaaatacagctacagattctttctcatcgttgctccaatcactgaaatctacaggcagttcgagtcctaacgcggaatcttgaattttgctaaggacaccttctacatcttcattactcttagctagattcaatgattcaagcgggtctgtttctttattctctgtaaagattaaaacttcatagagacttgcggcattacttccgtttgctttaacacgaacccacaccgttttattccctttgaattcaggtgggttagtcgtgctgtaatcaaaccagttctcgccattattctgagtgtattccatagtatcatccgcaccaacaatgacattgacatcatcatctacgattactaacggtgctgccaaattaaagaactgatcgaaacttttctggatatcttctactgaagcaaagccaccttgcggcatttttccaatcatccaattagccagttctgtcattctctccgaatcattgtgaatagattgcaatttatcaaagtctaatggataggctactgcaccagattcagggttatcattgataaactcatcaatggaccctttaaagaactggttaaagcccaacgtctctaacatcaattccgcgccttttgctttattgatttcaggatacccggttatccaaaatattacttggaaaaatgcgttgtctaactcagttgatccctgactaccatgaaatgaaattaaggtcatttggataaaatgagaaattagttgtcgatcaacaccgctcatttcttcatacttcatacccgatttatgcatcatttctgtggtgtcattggtgaagtagtttttagactggctcaaaagattgtagaccagatccatttgaaattgtatagcaaacaagtccgtattactgattaaaatcatgccttgatatgccaagttaaaagtatattctaattgttcctcactagaatacgcttccccttttggcaaagtagccaccaatctcgctatcgcttctttctcttgtatagacaacccagaataaccaagtggcaaagtctcaatcaggttcccttccagtacctcctgtatttcgctaacagatccctcgctgattgcataatttaacttctccaaaggtgtcatcggattcgcttgaacaggtactacagcgacaacttggattaacatcagcaacaccagtaccgcactgattattttcctcgcatatgttttcattatttcctccttgagcctcccagctcgaatcatttatacttttcattctagtactttggtctgaacggattctgaacaattggcgtaaaatcgcgaaaaaacattaaaattccgtatttttttcgtgatttttcaacaatccccctatgaaattcatcttttcttgcatttttctgtaattattttaatctatagacctatgtatttcttctcagcatgtagaattttacgaggaatgcgaaagcgaaagtgagtgagtatgttaatctttaggattcgttacagcaaagtttctgtctaatacattcattggattgtattcaagttcgttaaactgcaaaaggccacccccaaggatggccttctttatctactttgataatattacttttgcgctgcagcttcgatatctgcatatgcccagtgtgttgctggtacatcactgaacgttggcgtaactgcgccagttaggggtgtgcggttgaacagtacgttcaacactttcaccgcttcagcacgcgtcagcttgctatcgggtttgaatgtaccatcgttgtaaccaaccatcaggccagcagattgcacgtatgcaatcgcatctgctgcccacaggtctgcggatacgtctgtgaaggacactgctggaccattcacggttgttgcactcgcttgttgctgcatccaacgataagcaatcgtcgccatctgtgcacgggtgatcgaaccttccggtgcaaattgggtgttgctcatgccgttcatgatgccaacggattgagccttttgaatctcacttgttgcccagtgtgtcgcagataaatccttgtagctcacgctatccacgaaacttgctgcttcagttggaagatttcgagccagcatggctgccatttgtgcacgtgttacgaatgcatctgggcggaaatct

SEQ ID NO: 28 - DNA, 3521 bp, Paenibacillus xylanexedens
  source 1..3521: mol_type = genomic DNA
ttaacgaaaagacaacaacttgtaaaagaaggaattcaagaagtttttaataatgatcgaataaacatcgttcatttaagcggtcctcctggaattggaaaaacatttttggttaaaaaataccttgatgaaatcataaattcttatgaagattggaaagggtatcatattgaaggcaataaaggagacatcgatgcctactctaccattattcattcagaaacatcgaatcgaataaatgagaatactggaacaaatttcaatttaggatttagtattcctttggtattttctgtcgggttaacgagcgcattcaagagaaaagaaatttttgattcaaaaatagatttctttttaagacagcttagaaaatcttcagaaagtaatattgttattgtcgcagatagttatgaatactgggacaaacactctaaatcatttatagaagccataataagtcgcaaacatttgctaaaaagtaaaaacattagacttgtaattattacaaatgaagaagatcgtgctaaagtgacagacataagttttaagaattttataacatcaggaaaacattacaaattaattgctcctgaaattaatgaactaactgagataattagtttattagggtataaattatctctttctcgaagtgaacttgatactattatgtcattaagtggagcaaacattgattttatcaacatggttgtagatggactttataacgatcaacaagcaaagttatatccagatgaaaaaggttttagtataaatgaaattttggaaaatagactgaggatttttggtaataaagagaaagatgttaatgacattttgaaagcatcttcggttattgatggtgattttaacacggatgaggttagttacctgtgtgatgaaaaatatgaaacagaagatttactctcccagtcttgcacatatcttttgttgaaaaaaggaaaccaattcgcgttttcaaatactctaatccagagttttttttatgataaagcaaccgaaacccaatctaaatttcattacaaatactacaaatatttgaaacagaataggtcggaaagttattctttacgagctttacatctatcatcggcaaacaaggaaaaaaaatatactaaagaaattgttggattgtttgcattagcttattgccgcagtattgcaatatcatggatacctgatgatcaaatatcgattaaacaaactttgaatgaaatcattcaaagcgacattgaattaagccctcttattaaagatttagactatctgtttaaagcctgtaatcagtatttggcccaaaattatcaacaagcaaacaatgaactgcagaatatttccgactcaggatcattgttattgagagctgaggtattacgtatgcaactgctggtttcgctgatgctcaatatgaacacaaaccatgtaagaaaatatgttaagttattatcttacttgttagaagagctagaaatagaagaacctgaacagtgggctcaatgctccttcgcactattctctacgtacacaaacaaacttggagagttcgataaaggtgaagagatggcatttaaattactaaattttattgataaacaaggtaacaggccgttcttcaactatatgcgtaatattatgtatcgaaaatcatttttatttaggtccgctttaatgtctaaaagaaatattttagatagtgtagaatattttgaagctgcggatgattatgtccagtattatttctcactctgtaactatggagggatttcaattgttttaaacgaattagatgaagccatgttacatttggaaagatgtttgcaactggtgtctgaacacgattatattgaatttccttcaataggaaaaattcacaataatttatttttagcgagattcctttccaaactacgcccagctaaaataaacaaaaatcttactcaagaaatgatagaacaaagtattatcgatttcgaaagtaagatttcgtttacacctagcgagaaagatgcaattatgttaataaatattgctaacctgcacttaatcaataaggattacactcgctttgaagatatcttagttagcttaaaaacacagattcttattaacaacgaagatcaattttatgattattatcttaccaacttggaactaattaaaagtttacttcagcacgattggttattggctgaaaaactgttagctgaacttaagaacaaactgccagaatttcataagaaaaatattaaaaaaatgaaaaacagaataattgccctggaaaaaatgattgcagcacaaattatgcttgatcctctcctgcttgatcaatgggtatatgatcatagtgaacatgaagatgatgcttgccagttttattgtagattgtttctcttttcagatcttcaattttcatctttatgagtcgtagttctatcttaattagaattggctgataaagcgataatggagctatatatatcatggtaattaagacccagctgttcataagcgaaagcaaacgaactatgctgggtcgtatacggcgaagcggcaatatccattaagtaaggcactccttgattatttattctgaagtctactctcccatatccttttagtcctaccagccttccaatttgtgtagccgtagaccgaattttttcaacaacagatttcgggaactctttatctaaagaatagaagccataactatcactataagagtgagcgtaggttagaatttcttgccctacatggttctcaccatcaattgaaattccaactggattcattgcataaggtttacttgatataagaagtggtacttcacattcaaaccctgaaatgaattcttggactaaaagaggagtatttttttctaaactctctcttgttatttccaactgagactcttgattatatttttttatagacgatttcgaaagtcctatgctcgctgattcatgcatcggctttattattatatttgtttctaccaacggctgggcgccgttaagccaagtatgaaccgggtcatatacccaactatttggaactttaattccatggttatctaagtattttgtatacatatatttagctctactaaatgaaattacaagtgcatctgaccctgtatacggaattgacataaggtcacaaaacgaaggaataagtgatttttttcctgtatgttgaccatttcgcgatagattgtaaacaaatctcttatttctataagaggattctttcagagttgttagaataaattcaatctcgttaaagaagggctcaacaaaaaagccagcattctgaattcctgttaaaacttcttcaaattcttgatcattgaaaaactcgttgtttgtagagtaactcatcaggctattatttatttctctagttttggaacgtgtatttgttaaaagagatacgttgaagtttgctcgaagcgattcaacttttggtttcagatctttaattagattttcgatttcttt

SEQ ID NO: 29 - DNA, 3154 bp, Paenibacillus xylanexedens
  source 1..3154: mol_type = genomic DNA
ttcttcgtcatagaaactggagtcgattgccgcttccgtcacaccataggcgttaatgatgcggaacgacgagccaaaccgctcctgcaaggtacggtaatctgctacactgcagctgtccgagcttgtgatcaacagctccataccgcttaactttagcccctgctcatgcacgtattccataaacggcacgatcagtgctggtgttgattcaaagatcgtcacttgctcccgctctatccagtagtgcagacgagacggatcaatccggtcgtccttcggtacaatgaccatggtgcctccgttgtacaacgtccgcgcaatgtcacccacgaaaacatcaaacgagaagcttgcgagctgcagcagtcgcaccgggaactgatccaaccggtattcccgtcggtagcccgctgccgtgttcactaggctgcgatgctcgatcatcacgccttttggcttgcccgtcgttcccgatgtgtagatcacgtacgccagatcctccggacgggcttcatggaagctgtccataccgacaacatcaacatcatttggataactctcgccaccaccgttcacagcccccgttagcttgccgttgactcgatcgggagcactgttggagccttggccaaagtccattggcacattgcttcgttcctcgttgtacgacgtttcgtcgtcgagatacagcaccgtcgccagtgccagttcctcttcaccgagccaggcttcggcacgctctcgcagcggcgtttgcgtcagcagcaccttcgctccgctgtcttccagcatgaaccgcacacggtccaccggataatccgggtcaagcggcacatacgccccgcctgctttccagacggccagcacggccaccaacaggtccaccgaacgctcagcgagaatgccaacaatctcctcccgaccgatgccgcttgcgcgcagcgtggccgacagacggttcgcccgctcgttcagctccacatacgtcagccgatcgttttcgtaaacgacagcttcagcttcgggcgtgtgttccgcctgttcctcgaacagtcgatggaacgctgccataggagcctgttccggttgcgcagggttaaacgcgccgacaatctgctctttttcctctgccgttaacaagttcagctcggcaatagtcgccgacgggttgcagagaatggattcaagcagctgcaagtagtgggcagccaacttctccaccgtttcggttttatatagagccgtggcgtattcaaacagatattccaagccgtcctcaatctcggtgacgtccaagctgagatcgaatttggaaacaatttcttcgctggcatacgtcgacagatgcagtcccggaagctgaatttccacattttctgtattctgcaaagcaaacatcgtatcaaacagtggatgacggcgtagatcacgagccacgtttaccttatccaccagttcctcaaacggataattctgatgttcaaaagcaccaagcgttgtctccttgatttccttcaagtagtcaaggaacgttttaccggcagccgggtaacttcggatggccaaagtattaacgaacatcccaatcagcggttgaacgtcgctatgatttctgcccgcaatcggcgtacctaccaccacgtcttcctgacctgaatatttatgcagaagcacgttatatgccgcaagcagaaccatgtaaagcgttgcgccgttttcagctgcaagccgtttcagaccttcgcttttctcaatattcataaacaattgcagcgtgcggccctcatagctctgcatagccgggcgcggatagtccgttggcatttccagaactggcagttctccgcggaacatgtcaatccagtaggcttcctgcttggcaagttgcgttttctgctcgtccgattgctgccatactgcataatctttgtactgaatgcggagtggcttgagcggctccccgctgtacaagtgcacaaactcttcgatcagtacgtccattgaaacgccgtccgatacgatatgatgtgtatcgaacatcaggatgtgccggtccggcgcgagttcggcaatgcccacccgcagaagtggcggcttcgctagatcaaacgcacgaacaaattggcgcaccgtttcttccgcctgctccccgctgatctgcacatattccacctggaaggtgacttcttcgtaaatccgctgaaccgcttcgccttcaaccatctcaaagctggtacgcagcgtttcatgacgagctacaagctcgcggaacgcttcttcaaaccgctgccggttgagctgcccttcgagcagcatagctcccggtatattgtagctcagctcgcctccttccagctggttcaagatatagagacgtttctgcgcagaagagagcggataatactcgctaggttccgcagccggaatagccataaacgagccgatctccaaatgctccatagccacagccatttcctcaactgtcgagtagcggaatacgtcgcgaagcgggaattgggcgcccagctccttatgcattttgctgacaagtgttgtcgcccgcagggagtgtcctccgaggtcgaagaagttgtccgttacgcctaccgccttctcccgaacaagtacctcctgccaaatggcggccagttttgcctccagttcggtgcgcggtgccacgtatttgcggcctccgcctgctccccctgccggcgctggcagcgccttccggtcaattttcccatttggcgttagaggcaattgctccagttcgacgaaatacgacggaatcatgtatcccggtagctcgctggagatcgcccgtttcaaatctgccgccgtcaagcctttttccactgtataataagcgcacaacgctttctgcccttcttgatcttccctgacaacaacgaccgcttccttcacgccacctacactcagcaactttgcttcgacttcgcccgtctcgatccggtagccccggatttttgcctggttatcgatccgcccgatgaagtccacgttgccgtcctccatccaccgcgccaagtctcctgtgcgatacagtcgctcaccagcggtgaaaggactgtctacaaacttctcatccgtcagctctggacggttcaagtacccgcgcgccacactgact

SEQ ID NO: 30 - DNA, 2777 bp, Paenibacillus xylanexedens
  source 1..2777: mol_type = genomic DNA
attttgatgggagtgatgaggatatcggctatgaatcctgttggatggagtgcatcgttaatccttgatccagtggtagtaatgaattgcgaaatgtcatgaagtcatctgagctttccacaaatttcgaggtgcgaatctcccagggaaatcatgtgagctttgggttcgaacctgtttcagttttatgaccttttggcaacgagggtattgagttaatatactgttgtgggatatagtggagctaatatgtggaaaaagtaccggaaatacgtattaaggtatactaaacataacttgatacgtgtatttccgctgtcgcactccgtatggagtgcgtggattgaaatactctggacgtaactttgttttttacgatgacttgtcgcactccgtatggagtgcgtggattgaaatagatcaattttgatatcaaagttaaatgatccacgtcgcactccgtatggagtgcgtggattgatattatttagctgcctataccatcgggcgctttttttatttttagtcacactttgtatggaatgatgatccatcctttttatagaattaaaaagtgaattcaacttgctcccagttccacgttctatttttaaaaaatttccacttttaagttatataatcccgatcagaaaataaaaatagcgctcactgataatccaggagcacctaacgaaatctaaagtccaattacaaaaggccacccgcatattgcaagtggccctttactctacccgttaacaccgtgattaaatggagaaattgttggattggaagatggagaggaaaccggaatcacaaaactaagaaatgtcatcagaataaatgtagctactaatgctcttttcatcatataccccctgcaatatagttttgtacttcacgatctgatccgtagtagcaatttttcgtaaatcctcaaatatacctatagttgcaataatgtctttgtctaagtccattgtaacccctacttgtagataatcgaggatataatttatagcaacatcgtaccgccgctgacccaaattgtatattgcaagttgattaagtaattgtacgtagtatacacgattccctaagtcttcaagctctgaaaaagcttctaactgttcagtaatagagttaaagtaatattcatctacattccacttattcaagttcgcggcttcgacaattgtaataaatcccggcagtgcttcctcttcattctcatgtataaaatcaatatattcatttaatatctcctccttgccggacaacaaatcaacggcgtatccgttagccttcgcgaatcctttaaaacgttctattaccactaagtcctcatctgttgcattgtcgtaccatcccaagtctgcatatttggctatgtattctctagcaagatcaaaatgaccatgcttttggaaaacgatagattttgctaaatacccatagccaaaataatatatcaaaggacgctttatcatttgatttaaaggaataacgagttcatcccattttttcttattttcatacatacgttctgccaaggataaaatgtggtcagcaatacgatccgcttcgtcccattcgctctgtctatagcttagtcggaataactcaaaacctttatctaaaacatgtacatgatccgacagcagataaactccattgtctatagcattctccactgctaacgcctccataaactagatttaattcactataaaagggtctcttaattgttgctacgcagtaatatcctctgtttaattacaaatatacttaaaattcaaaatttaattagtattgagaagtttaatcatgaaactatataacgacagaagattgtttcttttgaatatatttacagtataactaatgatacttataagggcaatgtttaattattttgaatcttgtgaagactccaatacataacagctattgtctagacttcttagtaagaggagtagatgacatatatgaatcaaacgattgctgaacagattggtgttatcataaggaaattacgaacagaacagggattaacacagcaggctttagccgatgaaatcggctcatctttctcctttgtcggcagagttgagcgcggtgaaagcaacgtcacattagagactatcattaagatttcgaatgccttgaaaattgagttttttgatcttatgagtttaggaaaaaagcaagacagcgaggatatcctggcaatccatgcattacttctaaaaagaagcgagaaagagcaaagaaaagcacttaatattttgaaagaagtatttgatcgggatgaggtgtagaagagacgtttaatagtttatctttgttcaaggtttgtttagaatcagggcaagtggaggaggtaaggttgggatatgtgatttaaattgatactgcccacaatatgtactatgttattaaattaattgttaagaaatcaagaacagtctgccaccttggcaactgttctttttgatacattaagttattgatagttctctttacttatgtattaatcaaagagtaagataatttcttttaaatggaggaggaatatgatgttgaagaaaagatcaatgtatcaaaaattctcggaaattctcggcattgcactcttgatgctcatcgcaacaatatttatgctaccgagggttgcgctagcagcaaccgaaccaacatatcaggaatgggacaaggggcaggaacatgtggggttaagccatctgtggtttactgaccgagcagataatgggctc

SEQ ID NO: 31 - DNA, 1957 bp, Paenibacillus xylanexedens
  source 1..1957: mol_type = genomic DNA
tttgatgggggtgacgaggatatgggctatgaatcctgttggatggagggtatcgttcatccttgatccaccagtggtagtaatgaattgcgaaatgtcatgaagtcatctgaaacaggtgcgaacccaaagctcacatgatttctctgggagattcgcacctcgaaatttgtggaaagcttcagtttcatgaccttttggcaacgaggatattgagtttatatgctgttgtgggatttagtggagctaatatgtggaaaaagtatcggaaatacgtattaaggtattctaaacataacttgatacgtgtatttccgctgtcgcactccgtatggagtgtgtggattgaaatccatctgagtttgccgatgtcgcccgtcccgaatgtcgcactccgtatggagtgtgtggattgaaatcggattctgaaagggattcaagaggcaggagaaagtcgcactccgtatggagtgtgtggattgaaatcccacatcctccaccgcgcctactccacgtacggagtcgcactccgtatggagtgtgtggattgaaattgaagaaactgtttaatgtgataactaacttgggtgtcgcactccgtatggagtgtgtggattgaaatcaagcaccggtgaacacactcttgacgacattgagtcgcactccgtatggagtgtgtggattgaaatccccgcggtaaggttgttggttcgtatgccattgcgtcgcactccgtatggagtgtgtggattgaaatttcttataattatcccgaactggtgttcccgtcgtcgcactccttattgagtgtgtggattgaaattttagttttgcccaaaagatatgaaacgtacggtgtcgcactccgtatggagtgcgtggattgaaatttgtaggtgactttagcacccaatgattcagatacgtcgcacttagtatggagtgcgatgattaaaatgcatagttggggttcgtagcgtaaccagctttttgtcgcactctgtatgagtgcgtggattgaaatacatgtctgtaataattaataagcattaccatgtcgtcgcactccgtattttatagataagtggccaattcgaaataagctgtctaacaaatccattcttttggtgatatagaaaagtgattttaatacgttcatgtttgagctagtaacccggaaatgccattctaagaatcggtcactgcgagacattttgagtaacatgcatcatgttaattctgaatagttcctctgtccatcgtatgaaacgataagccctagtagcacaactaccatgtcctggctttcatatgattcgaaatagacttagctagagaaaccttagagctgagaatgtctgttgtatgtttaatatattgatagcggatgatgcatgaatccatatggaccgaaataactgaatgagatgaacaaatcgagcacttgcggataatgcgtggaacatgctacgtaattggaccacggttccaggtacacatgaagaagggacgtttgatggtttatctttgttcacttggcttcaaattgataaagaaatttgtctaaaatcagggcatgtggaggaagtaaggttggattacgtgatttatatttgatactgaccataatatgtaccacccaattaaactaacggttgagaaaacaggaacgtattatccattaagttattgatagttctttttacttatgtattaatcaaagagtaagataatttcttttaaatggaggaggaatatgatgttaaagaaaagatcaatgtatcaaaaattctcggaaattctcggcatttcattcttgatgctcatcgcaacaatatttatgctaccgagggttgcgctagcagcaaccgaaccaacatatcaggaatgggacaaggggcaggaacatgtggggttaagccatctgtggttcactgaccgagcagataatgggctt

SEQ ID NO: 32 - DNA, 1307 bp, Paenibacillus xylanexedens
  source 1..1307: mol_type = genomic DNA
agctgtgatggggagcgaaaattatagtagcgaaggtcatgatctcacactgccaagaaaagcctctagccaggtgatggtgcccgtaccgcaaaccgacacaggtaggcgagaagagtattctaaggcgcgcggaagaactctcgttaaggaactcggcaaaatgaccccgtaacttcgggagaaggggtgccccggtagtgtgaatagcacgagggggccgcagtgaaaaggcccaagcgactgtttagcaaaaacacaggtctgtgcgaagccgtaaggcgaagtatacgggctgacgcctgcccggtgctggaaggttaaggggagtggttaggagcaatccgaagctgtgaaccgaagccccagtaaacggcggccgtaactataacggtcctaaggtagcgaaattccttgtcaggtaaattctgacccgcacgaatggcgtaacgacttgggcgctgtctcaacgagagatccggtgaaattttaatacctgtgaagatgcaggttacccgcgacaagacggaaagaccccatggagctttactgcagcttgatattgaatttgggtacgatctgtacaggataggtgggagcctttgaagcatgagcgccagcttgtgtggaggcaacgttgggataccaccctgatcgtatctaggttctaacctggtaccgtaatccggtgcggggacagtgtcaggtgggcagtttgactggggcggtcgcctcctaaagagtaacggaggcgcccaaaggttccctcagaatggttggaaatcattcgaagagtgcaaaggcataagggagcttgactgcgagacctacaagtcgagcagggacgaaagtcgggcttagtgatccggtggtaccgcatggaagggccatcgctcaacggataaaagctaccctggggataacaggcttatctcccccaagagtccacatcgacggggaggtttggcacctcgatgtcggctcatcgcatcctggggctgaagtaggtcccaagggttgggctgttcgcccattaaagcggtacgcgagctgggttcagaacgtcgtgagacagttcggtccctatctgtcgtgggcgtaggaaatttgagaggagctgtccttagtacgagaggaccgggatggacgtaccgctggtgtaccagttgttccgccaggagcaccgctgggtagctatgtacggacgggataaacgctgaaagcatctaagcgtgaagcccccctcaagatgagatttcccagtatgtaagaccccttgaagacgacgaggtagataggctgggggt

SEQ ID NO: 33 - DNA, 1280 bp, Paenibacillus xylanexedens
  source 1..1280: mol_type = genomic DNA
tgacgtggaatcgacccactggggcgccagcgcgattaccaatggcgtctctaaaggctatgtcgatggatacacgaatggtacatttaagcctgacgccagcgtcacacgcgcggaattcgtgaagatggtcgtctcggtcatggaacttgaaaccacgccatcaatcggtaaatggtacaccgagtatgttgatgccgcaagcaaagcaggcctgtatgcatctgccgatttcaacaatagcgaagcggcttggacaaaagttatgacacgcgaagaaatggcacgggttgcagctcgtgcgatcggggaaacgtcaaaggaagatgccaaatggatgtacctcgctacgaaagcaggtctaattaaaggtgtaggtatagggcagattgctccaaaagggctgaccacacgtgcccaggcgatcgttgtaatcgaacgtattctatccaagaacaccggtgcttcccttgacgtcgataagtatgcggtgggtagtgctgaaattgcatggcacggtacaaacatcttcaccgtgatgccagaaatgtgggtaacaacggaagcacatctgaaacaagctggtaagtcctcggtcgaagaaatgtggaacgaagaacgtatgaccatcacgtcaaaagacggactttatcaaggtaagttggacgctcttatcgctattgatttggctaatcctaatgacccgaacctaggactgcttgggccaatcaacacgctcaaatggtttaacaaccgcccttcaatgaaaaatctgatggtcaaagatcaaaaaaacagctatgttctatatttcaaaggcggaacggtattcaacaaagatacaaaaaaatatagttcttcaaaagatcttcaattcaaggtttctggatttagcagctctgataccaaggcatattccaatggtgtgctgaatgcaacctcctatctttatcgtaatacctggttcgatatccctgcagtaattattccaaaatcggggactgtacaagaatacggaaatctagaaatccatcttcaaacccctgctggtggattctggttcagtgaaactgttcccctcagtctgcgaggaactcgcgacgatgtctaattctttcttgtccaccaacgagtagtatgttgaggtacataaaaacggacatgtcgattatatggcatgtcttttttgattgagcaatctcaaagggagagttcgaacaactttcgggttttggccttaagaaatgagaaacaaagtgctaagcccatagagcaccaat

SEQ ID NO: 34 - DNA, 1128 bp, Paenibacillus xylanexedens
  source 1..1128: mol_type = genomic DNA
actgcttagacggacatccatcagtccgcgtcactaccctactgcgtccccccattgctcataacggcttacggtggtacaggaatttcgacctgttgtccttcgactacgcctttcggcctcgccttaggtcccgacttaccctgagcggacgagccttcctcaggaacccttaggctttcggcggatcagattctcactgatcttttcgttactcataccggcattctcacttgtataatgtccagcgctccttacggtacaccttcaacccttatacaacgctcccctacccctgatgcaaagcatcaagccatagcttcggtggtgtgtttagccccgttacattttcggcgcagagtcactcgaccagtgagctattacgcactctttcaatggtggctgcttctaagccaacatcctggttgtctgtgcaactccacatcctttcccacttaacacacacttggggaccttagctgatggtctgggctgtttcccttttgacaatggatcttagcactcactgtctgactcccggaagtaagtctatggcattcggagtttgactgagcttggtaacccttgcgggccccgcacccaatcagtgctctacctccacgactctgttttccgaggctagccctaaagctatttcggggagaaccagctatctccgagttcgattggaatttctccgctacccccacctcatccccgcatttttcaacatgcgtgggttcgggcctccagtgcgtgttaccgcaccttcaccctggacaggggtagatcacccggtttcgggtctacgtccacgtactaagtcgccctattcagactcgctttcgctgcggctccggctcttcaccttaaccttgcacgggaacgtaactcgccggttcattctacaaaaggcacgccatcacccctaaaacgggctctgactttttgtaagcacacggtttcaggttctatttcactccccttccggggtgcttttcacctttccctcacggtactgcttcactatcggtcgctaggaagtatttagccttggcagatggtcctgccggattcatacggggtttcacgtgccccgcactactcgggatccgtctcggagggaac

SEQ ID NO: 35 - DNA, 1082 bp, Paenibacillus xylanexedens
  source 1..1082: mol_type = genomic DNA
gacggattgtaatatgaagtgcgacacctactggaaataaataaaaaaatggcccatggccggattcgtgtagaatgaagtcaccacaacaccattcacacaaggagaatccaaccatgagctacagacatcttagcataatcgaacgtagcaagctagaagtcctccacagacaaggtagaagctcaagagccattgcgaaagaactgggtaggcatccatcgacgatttgtcgtgagttagatcgggtgacttcatcacatccttatcaggcagaacaagctcagaatgcttatgaggagcgtcgtaaggcttcagtctctcctgggaattggtctgatgccttggctgcttcactggaggaaaaattggaggcaacgtggtctccggaacaaatcaccgaacgtttccgcatcgaagggcgggatgcagtctctttcaaaaccatctatcgctggatctatgcaggtcgcctggttcgaggcgtattacaggttcttcggcataaggggaagcgtcagaaacccgcagaaacgcgcggtaaattcgctattggaaggactatttcagatcgcccaaaagaagtccgttcccgcgaaacatttgggcactgggagctggataccgttgtatcgggtcgtgggaaaagtaaaggctgtgtagcgacgttgattgaacgcaagacacgtttatataccgctgttctcatgcctgatcgcaccgctttgtcgatggagattgcgctcggtgtagcgatctcacagtatcccacgggaaccttcctcacagccacggctgaccgaggcaaggagtttgcatgctatgcccatctggaaaccacccataacctacacgtttatttcgctgatccgtattcatcctggcaacgtggttccaacgagaatgcgaatggattgcttcgagagtttttccctaaaggtaccgatctcgcgagggtttatgatgatgatctcgcccattcactcgatctaataaatcacagaccacgaaaatgcttaggttggaagaccgctcacgaatctttcgcagaagaactgtcgcacttggtttgacaatccgtc

SEQ ID NO: 36 - DNA, 797 bp, Paenibacillus xylanexedens
  source 1..797: mol_type = genomic DNA
agcgtttgatcctttttataaaatgtccaaccggcacttggatctctcatgtctctcacagcataacttccgtcttctgagagaataaccttttgatcatcttgaggttcaacaattaattgtccggatacatcaacaattccttcgccacttccttggattatccaaagtccgttctgtggctcacctaaactgtaatactgtttatctaaaggaataatcaaaccatcttgccgaacaatggcactgtacgcatcacgatggagtccccattctacggtattccctctgaattcgattttgtcttggaactctgcgggtaccacgagcttccctttgtaattcatactcccccacagtccatttatttttacggggaattgtcctgatttacgatattctggcccataattcttgtcttcgatgttaaacgccgtaagcacttttcctttattattgatgagtgcccacttaccgttctttttcaccaatgctgcttgattgtaaaagcttgttccttcttcatatgtaggagagataacgaattttcctttggtatttaggtagcccatcttcccatttttcttcgcaatcgccagcccattgctaaacccaccgatatattcaatgcctttatcctgaaatatcactttgcccttactattcattaactgatttctatttacgactgctacgccctggtagaatgcatctcttgctaattggaactgtggcttaatgacaaacttgccctggtaattgatgaatccccacttccagttttgacgaaccgggat

SEQ ID NO: 37 - DNA, 756 bp, Paenibacillus xylanexedens
  source 1..756: mol_type = genomic DNA
ccctcagcctccaccatataactttataacgacgcggggtggagcagcccggtagctcgtcgggctcataacccgaaggccgcaggttcaaatcctgcccccgcaattatactttccttgagaaagtgatctggaaccgtggtgtagttggcctaacatgcctgcctgtcacgcaggagatcgcgggttcgaatcccgtcggttccgccattttttaattaaatatacaccgtgccggtgtagctcaactggtagagcaactgacttgtaatcagtaggttgggggttcaagtcctctcgccggcaccatttttagtatttacatatgaatttgtgatagaatgtatattacaagtgaaattgttaatactaagattctcttagtggatgaatggcttactctatggcggtcgtggcgaagtggttaacgcaccggtttgtggatccggcattcgggggttcaattcccctcgatcgccccatgattttttaatggggattagccaagcggtaaggcaacggactttgactccgtcatgcataggttcaaatcctatatccccagccatttcattacgagtcattagctcagttggtagagcacctgacttttaatcagggtgtcgaaggttcgagcccttcatgactcaccattatattttgcggtcgtggcggaattggcagacgcgcacggttcaggtccgtgtgggctaacccccgtggaggttcgagtcctctcgaccgcaccatatgttt

SEQ ID NO: 38 - DNA, 734 bp, Paenibacillus xylanexedens
  source 1..734: mol_type = genomic DNA
ggctcaccaaggcgacgatgcgtagccgacctgagagggtgatcggccacactgggactgagacacggcccagactcctacgggaggcagcagtagggaatcttccgcaatgggcgaaagcctgacggagcaatgccgcgtgagtgatgaaggttttcggatcgtaaagctctgttgccagggaagaacgcttgggagagtaactgctctcaaggtgacggtacctgagaagaaagccccggctaactacgtgccagcagccgcggtaatacgtagggggcaagcgttgtccggaattattgggcgtaaagcgcgcgcaggcggtcatttaagtctggtgtttaatcccggggctcaaccccggatcgcactggaaactgggtgacttgagtgcagaagaggagagtggaattccacgtgtagcggtgaaatgcgtagatatgtggaggaacaccagtggcgaaggcgactctctgggctgtaactgacgctgaggcgcgaaagcgtggggagcaaacaggattagataccctggtagtccacgccgtaaacgatgagtgctaggtgttaggggtttcgatacccttggtgccgaagttaacacattaagcactccgcctggggagtacggtcgcaagactgaaactcaaaggaattgacggggacccgcacaagcagtggagtatgtggtttaattcgaagcaacgcgaagaaccttaccaggtcttgacatc

SEQ ID NO: 39 - DNA, 625 bp, Paenibacillus xylanexedens
  source 1..625: mol_type = genomic DNA
aattttgaagaaatacaataaattcaaacaagaggagaatggtgatgaaaaattcaaagacgtttagggtaggggcaattgcggttgcattagttattattgtgggagtgctaatggtgaccttctttttaacacgaattcctaatggatatgttggggtcgtttattcaccaaatggaggcgtaaaagatagcacactgagtcaagggtggaaactcgttggagcgtttgataaagtgacgaaatatccgatccgaattcaaacggtggaatacagagatattcagattgctacttctgacgggaaaaacatcacaatcgattttgcttacaactaccaagtagaaccaagtaaagtatcttctatctttaatacatttgggccaattagcattcaagaaattgaggatacatatctcaaaacacgttttcgtgacgcagctcgtaaaggtatttccaagtttacagtcattgatgtgtatggtgaaaagtcatccgaagcaggggtagacgtgcaacaacgtttttctgatgacgttaaagaattaggctttattgtatccaacgttactgtaggtgttcctcaacctgacgccaagactcaggaagcaatcgataagcgtgt

SEQ ID NO: 40 - DNA, 474 bp, Paenibacillus xylanexedens
  source 1..474: mol_type = genomic DNA
tcaaactctcaaacgtttggtggcgatagcgaaggggttccacacgttcccatcccgaacacgaccgttaagcccttcagcgtcaatggtacttggaccgcagggtcctgggagagtagaacgccgccaagcgtaacccattttgggttcaaatagtatatgtaatgtgggcccttagctcagttggttagagcgcacctctgataagggtgaggccggtggttcgagtccaccagggcccaccatctatacctttaaactttatatggggccatagctcagctgggagagcgcctgccttgcaagcaggaggtcagcggttcgatcccgcttggctccaccaaaaatattttacaagtttgttctttgaaaactagatatcgaaacgaaacaaacgcgaattagaacattcctttaagctgaacttgtgcaaacaagtcaagtgtataaaggtagttaaattgcttttgtgag

SEQ ID NO: 41 - DNA, 442 bp, Paenibacillus xylanexedens
  source 1..442: mol_type = genomic DNA
tatttgaatgtttccgttgcaggaaacgattctccatagaaaggaggtgatccagccgcaccttccgatacggctaccttgttacgacttcaccccaatcatctatcccaccttcggcggctggctccttgcggttaccccaccgacttcgggtgttataaactctcgtggtgtgacgggcggtgtgtacaagacccgggaacgtattcaccgcggcatgctgatccgcgattactagcaattccgacttcatgcaggcgagttgcagcctgcaatccgaactgagaccggctttgttgggattggctccatctcgcgatttcgcagcccgttgtaccggccattgtagtacgtgtgtagcccaggtcataaggggcatgatgatttgacgtcatccccaccttcctccggtttgtcaccggcagtctatctagagtgccca

SEQ ID NO: 42 - DNA, 401 bp, Paenibacillus xylanexedens
  source 1..401: mol_type = genomic DNA
tgagtttcaccaatttgccttggatcaattcttttgtgccgtcactgtgttcgatatagatcgccaggttgtccaatgcttgctgacgagcagccggatcggttggcagactgtcacgcagtggcaatgtgagtgtcacttcgcggctctgcatattcgtgtcgatctcaacgggacgagccagtacgcgaacattcgtattcggagcaacttgttgaatcaattgctctttcttcgcacgctcttcaacttctttgcgctccgattcctttttcaaaggtacaacgcggaagtacaagtcttgatcaaatccggcgatggaattcgtcggaacggaaatcactacattttcagtggaaatctccagcttgagcgagccatcattcagttcttttaccgcc

SEQ ID NO: 43 - DNA, 401 bp, Paenibacillus xylanexedens
  source 1..401: mol_type = genomic DNA
cgagttgcaccagtttgccttgaatcaattcttttgtgccgtcactgtgttcgatatagatcgccaggttgtccaatgcttgctgacgagcagtcggatcggttggcagactgtcacgcagtggcagcgtgagtgtcacttcgcgactctgcatattcgtgtcgatctctaccggacgagccagtacacgaacattcgtattcggagcaacttgttgaatcaattgctctttcttcgcacgctcttcaacttctttgcgttccgattcctttttcaaaggtacaacacggaagtacaagtcttgatcaaatccagcgatggaattcatcggaacggaaatcactacattctctgtagagatttcaagtttgagcgaaccatcattcagttcttttaccgct

SEQ ID NO: 44 - DNA, 368 bp, Paenibacillus xylanexedens
  source 1..368: mol_type = genomic DNA
aatggtgagtcatgaagggctcgaaccttcgacaccctgattaaaagtcaggtgctctaccaactgagctaatgactcatagaaaaactggtggaggatgatggattcgaaccaccgaacccgtacgggagcagatttacagtctgatgcgtttggccgcttcgctaatcctccaggattacatggtgccggcgagaggacttgaacccccaacctactgattacaagtcagttgctctaccagttgagctacaccggcgtattacatggtgttataaatggtggctcgggacggaatcgaaccgccgacacgaggattttcagtcctctgctctaccgactgagctaccgagccttactacattaaa

SEQ ID NO: 45 - DNA, 282 bp, Paenibacillus xylanexedens
  source 1..282: mol_type = genomic DNA
tcgaacctgtgacaactcgattaacagtcgagtgctctaccaactgagctatcagggaatggtggagccaagcgggatcgaaccgctgacctcctgcttgcaaggcaggcgctctcccagctgagctatggccccatactctggtgtatttcattgttgtggtcttgctatgggccctggtggactcgaaccaccggcctcacccttatcagaggtgcgctctaaccaactgagctaagggcccttatcaattttcgaaaaaaaataccccaatggggtttc

SEQ ID NO: 46 - DNA, 208 bp, Paenibacillus xylanexedens
  source 1..208: mol_type = genomic DNA
taatattaaggcccgttggtcaaggggttaagacacctccctttcacggaggtaacaggggttcgaatcccctacgggtcataataacttcaaaaaaagaagttgatttttacaacaagattatggtatgatcataaatgtgttgttcggaggcttagctcagctgggagagcatctgccttacaagcagagggtcgggggttcgatc

SEQ ID NO: 47 - DNA, 207 bp, Paenibacillus xylanexedens
  source 1..207: mol_type = genomic DNA
ggacgttgtacgatgaattgcatttgccatgcaaatgcatattattccctgatagctcagttggtagagcactcgactgttaatcgagttgtcacaggttcgagccctgttcggggagccatttgctctcatagctcagtaggtagagtgcatccatggtaaggatgaggtcaccggttcgatcccggttgagagctttggaaatgg

SEQ ID NO: 48 - DNA, 187 bp, Paenibacillus xylanexedens
  source 1..187: mol_type = genomic DNA
gatggtgagtcatgaagggctcgaaccttcgacaccctgattaaaagtcaggtgctctaccaactgagctaatgactcatactaaaatggctggggatataggatttgaacctatgcatgacggagtcaaagtccgttgccttaccgcttggctaatccccaataaaaatatggtggaggctgaggg

SEQ ID NO: 49 - RNA, 177 nt, Paenibacillus xylanexedens
  source 1..177: mol_type = genomic RNA
atatgcgcgtgtggcggaattggcagacgcactagacttaggatctagcgtctttgacgtgggggttcaagtccctccacgcgcatcctttatttgcggaagtggctcagcggtagagcatcgccttgccaaggcgagggtcgcgggttcgattcccgtcttccgctccaatatttt

SEQ ID NO: 50 - DNA, 176 bp, Paenibacillus xylanexedens
  source 1..176: mol_type = genomic DNA
aaactagatatcgaaacgaaacaaacgcgaattagaacattcctttttagctgaacttgtgttaaacaagtttcaataaaaacggtagattgcacgtacgatggtatcgaatgggagcgacttttggctttgcgcaagcaaaccaagggaagcgagcagtcgaaaccggagcacga

SEQ ID NO: 51 - DNA, 170 bp, Paenibacillus xylanexedens
  source 1..170: mol_type = genomic DNA
gctttaggcagttcaatacgtgtctcggacacggaatctttggtatctggaataacaatgcgtgcggtgttcatgttcaattgtttcgctttttctaccgattccttggcaatggcttcggtcattttcaccagatctttgatcgtgccgttggtttcggttgtacgtgt

SEQ ID NO: 52 - DNA, 167 bp, Paenibacillus xylanexedens
  source 1..167: mol_type = genomic DNA
aacacagttacttatccatttgttcagttttgatggaatttgaggggccatagctcagctgggagagcgcctgccttgcaagcaggaggtcagcggttcgatcccgcttggctccaccaaacaatttcatctatttggcttgttctttgaaaactagatatcgaaac

SEQ ID NO: 53 - DNA, 163 bp, Paenibacillus xylanexedens
  source 1..163: mol_type = genomic DNA
ataatggcgcgccctgagagattcgaactcccggccttttgattcgtagtcaaacgctctatccagctgagctaagggcgcaaatattggagcggaagacgggaatcgaacccgcgaccctcgccttggcaaggcgatgctctaccgctgagccacttccgca

SEQ ID NO: 54 - DNA, 160 bp, Paenibacillus xylanexedens
  source 1..160: mol_type = genomic DNA
tcgttctccggtatcgactgctcgcttcccttggtttgcttgcgcaaagccaaaagtcactcccattcgataccatcgtacgtgcaatctaccttataaaaacacttcacttgtttacacaagatcagcttaaaggaatgttctaattcgcgtttgtttc

SEQ ID NO: 55 - DNA, 159 bp, Paenibacillus xylanexedens
  source 1..159: mol_type = genomic DNA
gttcactaacgtttaagggggaactgtctccctttatcccttggcttaacgctgcccgtatattacatatcggtaggaactccacttttggttgtggacaaatcgatgtggtctacagatccatgtaatgtgaaggcgttttgtccatgtaaacaggat

SEQ ID NO: 56 - DNA, 152 bp, Paenibacillus xylanexedens
  source 1..152: mol_type = genomic DNA
ggttaagctactaagagcacacggaggatgcctaggcgctaggagccgatgaaggacgtggcgaacaacgaaactgcctcggggagctgtaagcaagctttgatccgggggtgtccgaatggggaaacccagctggggtaatttccagttac

SEQ ID NO: 57 - DNA, 150 bp, Paenibacillus xylanexedens
  source 1..150: mol_type = genomic DNA
agcaggttcttagaacctgcaacagcgattcatttcggtccgtcacttcggtgtggatgaaatgaagagcacaaattactcactcgttgttcggttttgagagttcaaactctcaaaacagcttgcttttgcatggagcttgttctttga

SEQ ID NO: 58 - DNA, 140 bp, Paenibacillus xylanexedens
  source 1..140: mol_type = genomic DNA
gatcgaacccccgaccctctgcttgtaaggcagatgctctcccagctgagctaagcctccatattatgacccgtaggggattcgaacccctgttacctccgtgaaagggaggtgtcttaaccccttgaccaacgggcctt

SEQ ID NO: 59 - DNA, 139 bp, Paenibacillus xylanexedens
  source 1..139: mol_type = genomic DNA
ggcccgttggtcaaggggttaagacacctccctttcacggaggtaacaggggttcgaatcccctacgggtcatatagttggaggcttagctcagctgggagagcatctgccttacaagcagagggtcgggggttcgatc

SEQ ID NO: 60 - DNA, 132 bp, Paenibacillus xylanexedens
  source 1..132: mol_type = genomic DNA
ttggttcggatgtgataagatataaaagttgctgaagagaacgacattcggtaacaaaataagtttgatctttgaaaactgaacaacgagtgagtaaacattctgcttgcagaatgaacgcgaaagtttgag

SEQ ID NO: 61 - DNA, 132 bp, Paenibacillus xylanexedens
  source 1..132: mol_type = genomic DNA
atcactttctcaaaggaaagtataattgcgggggcaggatttgaacctgcggccttcgggttatgagcccgacgagctaccgggctgctccaccccgcgtcgttataaagtttatatggtggaggctgaggg

SEQ ID NO: 62 - DNA, 128 bp, Paenibacillus xylanexedens
  source 1..128: mol_type = genomic DNA
ccgccgataaccaattcgcccagcacgccgactggcaccgggttcagatgtgcatccacgatgtaaaacttcgcattcaaccacgctttgccaatcggcacatggcctgtctgcggcagtttcgccaa

SEQ ID NO: 63 - DNA, 127 bp, Paenibacillus xylanexedens
  source 1..127: mol_type = genomic DNA
gaaaattgagttgtagcggcttgcacgctaggtgccgtgatgttcatcgtacctagcacaagcgctactaccagtgcaattcctgcgattttgataaactgtttcttcatgatactctctcctttta

SEQ ID NO: 64 - DNA, 124 bp, Paenibacillus xylanexedens
  source 1..124: mol_type = genomic DNA
ttaatggctccccgaacagggctcgaacctgtgacaactcgattaacagtcgagtgctctaccaactgagctatcagggaatatatgcatttgcagtgcaaatgcaattcatcgtacaacatca

SEQ ID NO: 65 - DNA, 121 bp, Paenibacillus xylanexedens
  source 1..121: mol_type = genomic DNA
gcaccaaatccttggatgtacggttgatgtgtactttgtgaagctttcagtccatccacaacaacgagggtgaacgtactgaattttgttacggtaaattcgatgccttcgctattatccg

SEQ ID NO: 66 - DNA, 120 bp, Paenibacillus xylanexedens
  source 1..120: mol_type = genomic DNA
gcttggcggcgtcctactctcccaggaccctgcggtccaagtaccatcggcgctagagggcttaacggtcgtgttcgggatgggtacgtgtggaacccctccgccatcgccaccaaacgc

SEQ ID NO: 67 - DNA, 114 bp, Paenibacillus xylanexedens
  source 1..114: mol_type = genomic DNA
actttcaactacagggcttttaccttctttggcgggcctttccagacctcttcgcttaaccggttcctttgtaactccatgtgagacgtcccacaaccccaaagagcaagctct

SEQ ID NO: 68 - DNA, 113 bp, Paenibacillus xylanexedens
  source 1..113: mol_type = genomic DNA
gccctgttcggggagccatatggagaggtgtccgagctggccgaaggagcacgattggaaatcgtgtaggcgtcacaagcgtctcgagggttcgaatccctctctctccgcca

SEQ ID NO: 69 - DNA, 104 bp, Paenibacillus xylanexedens
  source 1..104: mol_type = genomic DNA
atcgaaacgaaacaaacgcgaattagaacattcctttttagctgaacttgtgcaaacaagtttcaataaaaacggtagattgcaattgctcatattgagcaatt

SEQ ID NO: 70 - DNA, 104 bp, Paenibacillus xylanexedens
  source 1..104: mol_type = genomic DNA
ttagcggcggacgggtgagtaacacgtaggcaacctgccctcaagtttgggacaactaccggaaacggtagctaataccgaataattgttttcttcgcctgaag
